(19) United States
(12) Patent Application Publication
(10) Pub. No.: US 2016/0347829 A1
(43) Pub. Date: Dec. 1, 2016

(54) Compositions containing antimicrobial IgY antibodies, for treatment and prevention of disorders and diseases caused by oral health compromising (OHC) microorganisms

(71) Applicant: MERIAL INC., DULUTH, GA (US)

(72) Inventors: Robert Nordgren, Watkinsville, GA (US); Monica Dias Figueiredo, Athens, GA (US)

(73) Assignee: MERIAL INC., DULUTH, GA (US)

(21) Appl. No.: 15/162,472

(22) Filed: May 23, 2016

Related U.S. Application Data
(60) Provisional application No. 62/167,082, filed on May 27, 2015.

(51) Int. Cl. C07K 16/12; A61Q 11/00; A61K 8/04; A61K 8/64; A61K 8/98

(52) U.S. Cl. CPC C07K 16/1275; C07K 16/1203; A61K 8/64; A61K 8/982; A61K 8/042; A61Q 11/00; C07K 2317/23; C07K 2317/11; A61K 2800/74

(57) ABSTRACT

The present invention encompasses methods and compositions for inhibiting, treating, and preventing dental diseases in human and non-human animals, particularly domesticated companion animals.

### CROSS-REFERENCE TO RELATED APPLICATIONS

[0001] This application claims priority to provisional application U.S. Ser. No. 62/167,082, filed on 27 May 2016, and herein incorporated by reference in its entirety.

### INCORPORATION BY REFERENCE

[0002] Any foregoing applications and all documents cited therein or during their prosecution (“application cited documents”) and all documents cited or referenced in the application cited documents, and all documents cited or referenced herein (“herein cited documents”), and all documents cited or referenced in herein cited documents, together with any manufacturer's instructions, descriptions, product specifications, and product sheets for any products mentioned herein or in any document incorporated by reference herein, are hereby incorporated herein by reference, and may be employed in the practice of the invention. Citation or identification of any such document in this application is not an admission that such document is available as prior art to the present invention and does not reflect any view of the validity, patentability and/or enforceability of such cited patent documents. All sequences referenced herein by GenBank Accession numbers are herein incorporated by reference in their entirety, and said sequences are as set forth in GenBank at as of the filing date of the present application.

### FIELD OF THE INVENTION

[0003] The present invention encompasses inoculation of avians for the production of antimicrobial, including anti-adhesive, IgY antibodies, which are useful in preventing and reducing dental carries and improving oral health. The present invention further relates to oral hygiene and specifically to methods of treating the oral cavity with a dental delivery systems such as toothpaste, masticables including chews, dental floss or toothpicks, with improved cleaning, conditioning and antimicrobial properties, which provide the teeth with a protective barrier against oral health compromising (OHC) microorganisms. The present invention also relates to compositions and dental delivery systems having improved cleaning, conditioning, and antimicrobial properties, which provide the teeth with an impervious protective barrier.

### SUMMARY OF THE INVENTION

[0004] Tooth and gum disease can lead to serious health problems both in humans and companion animals. However, dogs and cats make use of their teeth more than humans do. Accordingly, toothache, dental disease, and loss of teeth can all have serious consequences for companion animals. To date, damage to the teeth and gums in companion animals is considered to be permanent and irreversible. According to the American Veterinary Dental Society, 80% of dogs and 70% of cats have periodontal (gum) disease by the age of three. Proper dental care could increase the life of these animals by many years. Accordingly, maintenance of good oral health and prevention of oral disease is a primary necessity for animals, which, unlike humans, do not have the ability to exercise control over oral and dental hygiene by using proper preventative techniques.

[0005] Dental care in dogs and cats has become common. Like humans, dog teeth and gums are also susceptible to many of the same oral health problems (e.g., gingivitis and periodontal disease). However, unlike humans, animals rarely get cavities. This is because cavities are primarily caused by the high sugar content of the human diet and the morphology of human teeth. However, periodontal disease affects both human and mammals alike. Bacteria and plaque that attaches to the tissues of the mouth can cause periodontal disease. The first stage of periodontal disease is gingivitis, which is very common. In this stage, the bacteria have mixed with saliva and formed plaque. Plaque adheres to the teeth and hardens, forming tartar and calculus. These tartar deposits irritate the gum tissue and cause inflammation, swelling, and infection. It is at this stage that gingivitis is most notable.

[0006] There are indications that oral health status has a profound effect on an animal's general health. Periodontal disease and other oral cavity pathologies may cause bacteria and/or their toxins to enter the bloodstream with potentially deleterious effects on various internal organs (e.g., the heart, kidneys, liver, etc.). Conversely, poor systemic health may manifest in the oral cavity in various ways and may also exacerbate periodontal disease. An animal's dental examination is therefore not always limited to the oral cavity, but frequently includes a general physical examination. Laboratory examinations, to evaluate systemic disease concerns, are also commonly performed. Some dogs and cats suffer from chronic oral infection (e.g., stomatitis, a poorly understood condition that is difficult to treat) and oral cancer.

[0007] Moreover, approximately 80% of dogs and cats demonstrate some degree of periodontal disease by four years of age (Harvey C E and Emily P P., 1993). The progression and etiology of periodontal disease in companion animals is similar to that of human periodontitis (Hennet et al., 1992 J Vet Dent). Porphyromonas-like black pigmented anaerobic bacteria (BPAB) have been identified in dog periodontal pockets (Harvey et al., 1995 J Vet Dent). Relevant species include, but are not limited to, Porphyromonas gulae, Porphyromonas salivosa, Porphyromonas denticanis, and are able to induce bone loss in a murine model of periodontitis (Hardham et al., 2005 Vet Microbiol).

[0008] In addition to small molecule antibiotic strategies, some companies have explored the possibility of vaccinating animals to protect them against the bacteria that cause oral health problems, including dental caries and periodontitis. For example, Pfizer obtained conditional approval for a three-valent bacterin vaccine containing inactivated P. gulae, P. salivosa and P. denticanis. However, approval was withdrawn owing to lack of efficacy.

[0009] In a related example, passive oral administration of IgY (known as hyperimmune γ-livetin from egg yolk) antibody against S. mutans GBP-B, in the context of a rat model of dental caries, has shown promise (Smith et al., Infect Immun. 2001 May; 69(5): 3135-3142). Streptococcus mutans are gram-positive cocci shaped bacteria. These facultative anaerobes are commonly found in the oral cavity, and are a major contributor of tooth decay. Streptococcus mutans is a cariogenic microorganism that breaks down sugar for energy and produces an acidic environment, which demineralizes the superficial structure of the tooth. The result of the conversion disintegrates the coating of the tooth then later dissolves the Calcium molecule creating a hole.

[0010] Another group has achieved some success using a lozenge to deliver anti-cell-associated glucosyltransferase immunoglobulin Y salivary mutans streptococci in healthy young adults to reduce adherence of S. mutans to teeth (Nguyen et al., J Am Dent Assoc 2011 August; 142(8): 943-9).

[0011] Recently, one group has demonstrated that the P. gulae strains, which produce “gingipain-like” enzymes, are susceptible to passive immunization by anti-gingipain IgY. (Rahman A. K. M. Shofiqur et al., (2011) Vet Sci Dev). Further, anti-gingipain antibody inhibited alveolar bone resorption induced by P. gulae. (K. Watanabe et al. 2013 IADR Seattle).

[0012] The growing interest in IgY technology stems from the numerous advantages it offers compared with using its mammalian equivalent, IgG. The primary advantage of obtaining Ig via laying hens instead of mammals is improved animal welfare. It is a refinement of the antibody production protocol because it does not involve bleeding the antibody producer animals, unlike the mammals models, and the yield is significantly higher. Moreover, the long-lasting titers obtained from laying hens also reduce the need for frequent booster injections (Schade et al., 2005). In addition, there are also numerous efficient and inexpensive IgY extraction processes (De Meulenaer et al., 2001), and the highly specific, hyper-immune yolk may even be used as is.

[0013] Sirsat et al. (2009) noted some risk in developing overly specific tools, but this risk is minimal in the case of polyclonal egg yolk antibodies. When Chalghoumi et al. (2008) developed IgY specific to two Salmonella serovars, they demonstrated a high level of cross-reactivity of IgY developed against a particular serovar with antigens of the other one, and vice versa. Thus, using vaccine antigens shared among several serovars addresses the risk of the developed IgY being too highly specific. In addition, the fact that Chalghoumi et al. (2008) were able to raise IgY against two Salmonella serovars in a single egg yolk indicates that it could soon be possible to develop real “cocktail eggs” targeting a diverse set of organisms. Finally, the use of IgY does not lead to undesirable side effects, disease resistance or toxic residues (Xu et al., 2011), unlike other drug strategies (e.g., antibiotics).

[0014] The standard protocol for producing antigen-specific IgY intended for passive dietary immunization in animals is known in the art. Hens are usually exposed to the targeted antigen through an injection. This triggers a humoral immune response that manifests itself initially by the production of specific IgY in the blood serum of the immunized hen, followed by its export in the yolk of laid eggs. Once the immune response has been induced, the transovarial passage of IgY takes about 6-7 days (Bollen et al., 1997). The composition of the pool of IgY in the yolk is clearly related to that in the hens' circulating blood (Hamal et al., 2006). Immunoglobulin Y (IgY), previously referred to as “egg yolk antibodies,” represents the functional equivalent of the mammalian IgG in birds, reptiles, and amphibians. In birds, IgY is continually synthesized and secreted into the bloodstream and transferred into the egg yolk (FIG. 1), where it accumulates in large quantities (60 to 150 mg per egg yolk) and at high titers, for long periods of time. The role of egg-yolk antibodies is to provide a passive antibody source to offspring against common avian pathogens until full maturation of their own immune system. IgY has a short half-life (˜36 h), which is considerably shorter than the half-life of mammalian IgG, and this feature is suggested to help avoid immune recognition (As reviewed in Suartini 2014†). As an immuno-intervention strategy, IgY presents several advantages over mammalian IgG: 1) IgY exhibits up to five times higher affinity and reactivity to a specific antigen than IgG when tested in competition assays (Rahman, 2014), 2) IgY does not bind or activate mammalian complement or Fc receptors, does not bind protein A,G, or rheumatoid factor and therefore cannot elicit non-specific inflammatory responses, particularly in the gastrointestinal tract, when administered orally (Rahman, 2014). Furthermore, IgY does not interfere with mammalian IgG in serological tests.

[0015] The first step in specific IgY production is to choose the target antigen. This can be a single antigen (protein, peptides or polysaccharides) or a complex multi-antigen (bacteria, mold, viruses or parts of these) (FIG. 2). The molecules exhibiting the best immunogenicity are proteins (Schwarzkopf et al., 2001). In the case of small antigens with a molecular weight below 12,000 da (known as “haptens”), conjugation to a carrier protein (e.g., bovine gamma globulin) is often required (Cook et al., 2010). Carbohydrates and nucleic acids could also be coupled advantageously with carriers because of their reduced immunogenicity (Schwarzkopf et al., 2001). Apart from the intrinsic immunogenicity of the target antigen, its quality and quantity should also be taken into account. The purity of the antigen is a crucial parameter because impurities could lead to IgY with more activity against the impurities themselves than against the antigen of interest (Leenaars et al., 2005). In addition, contaminations of the antigen with microbes, endotoxins or chemical residues from the inactivation/extraction process could have a negative effect on animal welfare as well as on immune response (Leenaars et al., 2005). The antigen dose is also critical because too much or too little antigen can lead to suppression, sensitization, tolerance or other undesirable immunomodulatory effects (Schwarzkopf et al., 2001). The recommended amount of a soluble protein to be administered in a given vaccine dose is usually in the range of 0.01 mg to 1 mg (Schwarzkopf et al., 2001; Cook et al., 2010).

[0016] However, until the instant disclosure, no effective IgY-based therapeutic compositions for treating, reducing and preventing oral health problems, including dental caries, were known.

[0017] Accordingly, Applicants set out to provide effective IgY-based compositions and methods of making an use thereof, to assist in the maintenance of good oral health as well as the prevention and treatment of oral disease in companion animals.

[0018] The present disclosure provides novel IgY antibody compositions and methods of making and use thereof. IgY antibodies may include those produced using gingipain polypeptides, including chimeric gingipain polypeptides. Some particularly useful polypeptides are disclosed in US 2003/0232022 A1 (to CSL Limited), the disclosure of which is herein incorporated by reference in its entirety. Related polypeptides, including related chimeric polypeptides, are expected to produced comparable results.

[0019] In an embodiment, obtaining specific IgY involves injecting an antigen-adjuvant combination at certain intervals. Numerous protocols, using different antigens, adjuvants, injection routes and intervals between injections, have been described over the years. All these factors are critical because they influence both the outcome of the immunization procedure (amount and specificity of the obtained IgY) and the welfare of the hens.

[0020] The following is a non-exhaustive list of representative microorganisms, portions thereof, and proteins thereof, which may be used to produce the IgY and IgY-containing compositions of the instant disclosure: streptococci, lactobacilli, staphylococci, corynebacteria, and various anaerobes in particular bacteroidetes, including Porphyromonas gingivalis. P. gingivalis is found in the oral cavity, where it is implicated in certain forms of periodontal disease, as well as in the upper GI tract, the respiratory tract, and the colon.

[0021] In particular embodiments, the microorganism may include Streptococcus salivarius, Streptococcus mutans, Streptococcus sanguinis and Streptococcus sobrinus. The family of adhesions from S. mutans and S. sobrinus has been shown to be effective antigens, and so Applicants envision that any of said antigens could be used to elicit production of specific IgY antibodies to block microorganisms that negatively impact oral-health.

[0022] In other embodiments, the microorganism may include Fusospirochetes, Veillonella, Actinobacillus actinomycetemcomitans,

[0023] Accordingly, it is a primary object of this disclosure to provide compositions and methods for blocking or interfering with the adherence of the foregoing microorganisms from the teeth and oral cavity of animals, including dogs and cats.

[0024] In an embodiment, the disclosure provides an immunogenic component that is used to elicit production in chicken specific oral disease blocking (ODB) IgY antibodies.

[0025] In some embodiments, the immunogenic component may include the following, or substantially immunogenically equivalent derivatives, fragments, or portions thereof: GenBank accession numbers having significant identity to S. salivarius, S. mutans, S. sanguinis and S. sobrinus oral health-relevant polypeptides, including, the surface fibrillar adhesions known as AgI/II, the glucosyltransferases (GTF) and the glucan-binding proteins (GBP).

[0026] In a particular embodiment, the immunogenic component may be an N-terminal fragment of AgI/II protein from Streptococcus mutans GS-5. The component may be the surface adhesin protein identified in GenBank as AFM81671.1 (gi392603507).

[0027] The immunogenic component may have significant identity to AgI/II, and may include homologous portions of the sequences represented by the following GenBank accession numbers, or sequences having at least 90, 91, 92, 93, 94, 95, 96, 97, 98 or 99% or greater, identity thereto: gi488214056, gi488225222, gi518152415, gi488227403, gi488279945, gi518147219, gi488223981, gi488203641.

[0028] In particular embodiments, the immunogenic component may comprise, consist of, or consist essentially of one or more of the following, or substantially immunogenically equivalent derivatives, fragments, or portions thereof, or sequences having at least 90, 91, 92, 93, 94, 95, 96, 97, 98 or 99% or greater, identity thereto: GenBank accession numbers gi1066835 (SEQ ID NO:227), gi1246379 (SEQ ID NO:228), gi167729944 (SEQ ID NO:229), gi167730167 (SEQ ID NO:230), gi1813996 (SEQ ID NO:231), gi188595513 (SEQ ID NO:232), gi1890077 (SEQ ID NO:233), gi2182812 (SEQ ID NO:234), gi2738803 (SEQ ID NO:235), gi2827775 (SEQ ID NO:236), gi298274962 (SEQ ID NO:237), gi333803263 (SEQ ID NO:238), gi363646003 (SEQ ID NO:239), gi376316122 (SEQ ID NO:240), gi392611916 (SEQ ID NO:241), gi4103639 (SEQ ID NO:242), gi45593253 (SEQ ID NO:243), gi478247382 (SEQ ID NO:244), gi482527365 (SEQ ID NO:245), gi490721105 (SEQ ID NO:246), gi493986068 (SEQ ID NO:247), gi499258510 (SEQ ID NO:248), gi499258936 (SEQ ID NO:249), gi501433637 (SEQ ID NO:250), gi501433833 (SEQ ID NO:251), gi503582056 (SEQ ID NO:252), gi503582195 (SEQ ID NO:253), gi505237613 (SEQ ID NO:254), gi505238317 (SEQ ID NO:255), gi516982302 (SEQ ID NO:256), gi516982304 (SEQ ID NO:257), gi516982708 (SEQ ID NO:258), gi516983121 (SEQ ID NO:259), gi516987696 (SEQ ID NO:260), gi517794814 (SEQ ID NO:261), gi517795927 (SEQ ID NO:262), gi518890617 (SEQ ID NO:263), gi519096608 (SEQ ID NO:264), gi519097773 (SEQ ID NO:265), gi519097774 (SEQ ID NO:266), gi519097795 (SEQ ID NO:267), gi519112703 (SEQ ID NO:268), gi543983601 (SEQ ID NO:269), gi545423791 (SEQ ID NO:270), gi545424583 (SEQ ID NO:271), gi545425072 (SEQ ID NO:272), gi545426533 (SEQ ID NO:273), gi545427051 (SEQ ID NO:274), gi545439371 (SEQ ID NO:275), gi545441087 (SEQ ID NO:276), gi545442195 (SEQ ID NO:277), gi547189063 (SEQ ID NO:278), gi548168374 (SEQ ID NO:279), gi550276358 (SEQ ID NO:280), gi557068 (SEQ ID NO:281), gi563394639 (SEQ ID NO:282), gi639227118 (SEQ ID NO:283), gi648615935 (SEQ ID NO:284), gi655448683 (SEQ ID NO:285), gi655944724 (SEQ ID NO:286), gi658545847 (SEQ ID NO:287), gi658546598 (SEQ ID NO:288), gi661258709 (SEQ ID NO:289), gi661305608 (SEQ ID NO:290), gi661309879 (SEQ ID NO:291), gi661310225 (SEQ ID NO:292), gi695722113 (SEQ ID NO:293), gi700231728 (SEQ ID NO:294), gi700260106 (SEQ ID NO:295), gi702977158 (SEQ ID NO:296), gi7245522 (SEQ ID NO:297), gi736404329 (SEQ ID NO:298), gi736404343 (SEQ ID NO:299), gi736408694 (SEQ ID NO:300), gi736412763 (SEQ ID NO:301), gi742261431 (SEQ ID NO:302), gi746372602 (SEQ ID NO:303), gi746373224 (SEQ ID NO:304), gi746373303 (SEQ ID NO:305), gi746375041 (SEQ ID NO:306), gi746375940 (SEQ ID NO:307), gi746376969 (SEQ ID NO:308), gi746377383 (SEQ ID NO:309), gi746377430 (SEQ ID NO:310), gi746382143 (SEQ ID NO:311), gi746383321 (SEQ ID NO:312), gi746385471 (SEQ ID NO:313), gi746385472 (SEQ ID NO:314), gi746385768 (SEQ ID NO:315), gi746388156 (SEQ ID NO:316), gi746388231 (SEQ ID NO:317), gi746390048 (SEQ ID NO:318), gi746391175 (SEQ ID NO:319), gi746391927 (SEQ ID NO:320), gi746392047 (SEQ ID NO:321), gi746395887 (SEQ ID NO:322), gi746395986 (SEQ ID NO:323), gi746398817 (SEQ ID NO:324), gi746399521 (SEQ ID NO:325), gi746402919 (SEQ ID NO:326), gi746403746 (SEQ ID NO:327), gi746404117 (SEQ ID NO:328), gi746404567 (SEQ ID NO:329), gi746404716 (SEQ ID NO:330), gi748669984 (SEQ ID NO:331), gi749914020 (SEQ ID NO:332), gi75345025 (SEQ ID NO:333), gi75348574 (SEQ ID NO:334), gi754467437 (SEQ ID NO:335), gi754467963 (SEQ ID NO:336), gi755775 (SEQ ID NO:337), gi762205553 (SEQ ID NO:338), gi762205668 (SEQ ID NO:339), gi762955586 (SEQ ID NO:340), gi762959862 (SEQ ID NO:341), gi762960358 (SEQ ID NO:342), gi763004002 (SEQ ID NO:343), gi763013925 (SEQ ID NO:344), gi763016605 (SEQ ID NO:345), gi763369462 (SEQ ID NO:346), gi763423212 (SEQ ID NO:347), gi763423514 (SEQ ID NO:348) or gi807048103 (SEQ ID NO:349).

[0029] In other embodiments, the immunogenic component may include peptidases or peptidase domains as included in or derived from the following Accession numbers or sequences having at least 90, 91, 92, 93, 94, 95, 96, 97, 98 or 99% or greater, identity thereto: gi505238317, gi516983121, gi763423212, gi167729944, gi516982302, gi661258709, gi518890617, gi661310225, gi655448683, gi517795927, gi746385471, gi563394639, gi746392047, gi746404716, gi746390048, gi746404117, gi742261431, gi746377430, gi763016605, gi695722113, gi700231728, gi545425072, gi545441087, gi700260106, gi545424583, gi545426533, gi746383321, gi392611916, gi545439371, gi482527365, gi762959862, gi746373303, gi501433833, gi763013925, gi75345025, gi2182812, gi75348574, gi762205668, gi2738803, gi503582056, gi736404343, gi736408694, gi519097774, gi648615935, gi45593253, gi1890077, gi655944724, gi519096608, gi519097795, gi754467437, gi2827775, gi516987696, gi763004002, gi4103639, gi746372602, gi762205553, gi188595513, gi557068, gi762955586, gi333803263, gi503582195, gi543983601, gi763423514, gi499258510, gi1066835, gi1813996, gi499258936, gi736412763, gi7245522, gi1246379, gi516982708, gi746373224, gi519112703, gi478247382, gi547189063, gi505237613, gi516982304, gi167730167, gi501433637, gi763369462, gi550276358, gi746395986, gi746403746, gi748669984, gi746376969, gi363646003, gi517794814, gi746382143, gi746375940, gi746391175, gi746388231, gi746385768, gi807048103, gi746398817, gi746375041, gi548168374, gi754467963, gi746377383, gi746395887 or gi746385472.

[0030] In still other embodiments, the immunogenic component may include peptidases or peptidase domains as included in or derived from the following Accession numbers, or have at least 90, 91, 92, 93, 94, 95, 96, 97, 98 or 99% or greater, identity thereto: gi499258510, gi746373224, gi501433637, gi1246379, gi478247382, gi545423791, gi545427051, gi545442195, gi7245522, gi762955586, gi1813996, gi333803263, gi1066835, gi499258936, gi763004002, gi2827775, gi490721105, gi543983601, gi188595513, gi746372602, gi557068, gi762205553, gi4103639, gi503582195, gi755775, gi746395986, gi517794814, gi746403746, gi746398817, gi746391175, gi746388231, gi746385768, gi746382143, gi746375940, gi746376969, gi807048103, gi746391927, gi746399521, gi746388156, gi746404567, gi702977158, gi746377383, gi746395887, gi746375041, gi746385472, gi746402919, gi298274962, gi749914020, gi736404329, gi658546598, gi545424583, gi545426533, gi545439371, gi763013925, gi762959862, gi482527365, gi392611916, gi742261431, gi695722113, gi762205668, gi2182812, gi75348574, gi503582056, gi2738803, gi45593253, gi746373303, gi75345025, gi658545847, gi545425072, gi545441087, gi563394639, gi763016605, gi700231728, gi746377430, gi746404716, gi746404117, gi746390048, gi517795927, gi746392047, gi746385471, gi501433833, gi700260106, gi1890077, gi493986068, gi746383321, gi519097774, gi736408694, gi736404343, gi639227118, gi519097773, gi547189063, gi661309879, gi763423514, gi376316122, gi167730167, gi736412763, gi519112703, gi763369462, gi762960358, gi661305608.

[0031] In some embodiments, the immunogenic component may include the sequences as set forth the any one or more of the following polypeptide sequences, or have at least 90, 91, 92, 93, 94, 95, 96, 97, 98 or 99% or greater, identity thereto: SEQ ID NOs.: 110, 111, 112, 113, 120, 123, 124, 125, 130, 131, 132, 133, 135, 136, 137, 138, 143, 144, 145, 146, 147, 148, 221, 222, 223 or 224. In particular embodiments, the immunogenic component may comprise, consist of or consist essentially of a polypeptide having the sequence as set forth in any one or more of the following: SEQ ID NOs.: 110, 111, 112, 113, 120, 123, 124, 125, 130, 131, 132, 133, 135, 136, 137, 138, 143, 144, 145, 146, 147, 148, 221, 222, 223 or 224.

[0032] In some embodiments, components of S. mutans, S. salivarius, S. mutans, S. sanguinis and S. sobrinus, P. gulae, P. salivosa, P. gingivalis and P. denticanis, are used to elicit production of adherence-blocking antibodies for the production of therapeutic IgY antibodies. The components may be, for example, any of the following: gingipain-like enzymes, gingipains derived from P. gingivalis deposited as ATCC 33277, P. endodontalis F5 or F2, P. circumdentaria, P. gingivalis 381, and the like. Gingipain enzymes may include at least the following: RgpA, HagA, Kgp and homologs, paralogs, and orthologs thereof

[0033] The present invention is based, in part, on the finding that IgY antibodies raised against certain bacteria and bacterial antigens may be incorporated into dosage forms, which are effective in maintaining the oral health of animals, in particular companion animals.

[0034] In certain embodiments, the IgY are produced according to standard techniques. For example, one of the foregoing antigens associated with oral health compromising (OHC) microorganisms, is administered to hens and IgY is recovered from said hen's yolk. Hens may be exposed to the OHC antigen through an injection. Said injection triggers a humoral immune response that manifests itself initially by the production of specific IgY in the blood serum of the immunized hen, followed by its export in the yolk of laid eggs. IgY antibodies against oral health compromising (OHC) microorganisms may be recovered or otherwise used in about 6-7 days or about 6 to about 10 days after administration of the antigen.

[0035] In an embodiment, the first step of producing an antimicrobial IgY antibody effective against OHC microorganism is to select a protein, peptide, polysaccharides, or entire OHC microorganism. In the case of small antigens (MW below about 12,000 da), conjugation to a carrier protein (e.g., bovine gamma globulin) may be required. The antigen dose is also critical because too much or too little antigen can lead to suppression, sensitization, tolerance or other undesirable immunomodulatory effects. The recommended amount of a soluble protein to be administered in a given vaccine dose is usually in the range of 0.01 mg to 1 mg.

[0036] Accordingly, in an advantageous embodiment, antimicrobial IgY antibodies according to the instant disclosure may be produced by administering to a hen one of the OHC microorganism-associated antigens recited above. For example, hens may be injected with an effective amount of a peptide having a similar immunogenic potential as compared with a peptide having the sequence as set forth in any one or more of SEQ ID NOs: 110-113, 120, 123-125, 130-133, 135-138, 143-148, 221-224 or 227-349.

[0037] In certain embodiments, veterinary compositions comprising the antimicrobial IgY antibodies of the invention are advantageously in the form of soft chewable formulations that are palatable for animals, including cats and dogs. In another embodiment, the oral veterinary compositions of the invention are in the form of a chewable tablet.

[0038] In other embodiments, the veterinary compositions may be oral ointments, gels, mouthwashes or liquids. Liquid formulations comprising IgY antibodies may be spray-deposited, or otherwise applied as a coating, to solid dosage forms, including chews and tablets, or may be applied to solid articles, such as chews or toys.

[0039] According to an aspect of the invention, an IgY antibody is used in the manufacture of a medicament for the prevention or treatment of a disease caused by oral bacteria in an animal.

[0040] According to a second aspect of the invention, a cosmetic method of preventing or decreasing oral staining, dental caries, or bad breath in an animal comprises the step of exposing the oral cavity to an IgY antibody raised against an antigen from or derived from a microorganism that causes oral health problems.

[0041] According to a third aspect of the invention, an animal chew comprises an IgY antibody raised against an antigen from or derived from a microorganism that causes oral health problems in animals, including humans, or a medicament comprising the IgY antibody.

[0042] According to a fourth aspect of the invention, an animal foodstuff comprises an IgY antibody raised against an antigen from or derived from a microorganism that causes oral health problems in animals, including humans.

### DETAILED DESCRIPTION OF THE INVENTION

[0043] The IgY antibodies are useful in preventing and treating diseases caused by oral bacteria in an “animal”. As used herein, the term “animal” is to be given its recognized meaning in the art, i.e. any non-human member of the animal kingdom. Preferably, the animal is a non-human mammal.

[0044] In a preferred embodiment, the animal is a “companion animal”. As used herein, the term “companion animal” refers to an animal that is kept as a “pet” by a person for companionship and enjoyment. These will usually be mammals such as cats, dogs, rabbits, ferrets and rodents. The most preferred companion animals are cats and dogs.

[0045] In an alternative embodiment, the animal is “livestock”, i.e. an animal that is reared agriculturally to provide a useful product. A livestock animal is usually a mammal, including but not limited to pigs, cows, goats, donkeys, sheep and llamas.

[0046] In another alternative embodiment, the animal is a “performance animal” such as a racehorse or racing greyhound. The skilled person will recognize the need for these animals to be maintained in optimum health, including oral health.

[0047] The IgY antibodies have been found to be particularly effective in maintaining the health and favorable aesthetics of an animal's oral cavity. The IgY antibodies have several medical (i.e. veterinary) applications, as follows: prevent the adherence of certain bacteria (known to promote dental caries) to an animal's teeth; prevent and remove plaque and calculus formation in the oral cavity, particularly on the teeth; prevent and treat gum diseases including gingivitis and periodontitis; and prevent and treat halitosis.

[0048] Surprisingly, polyclonal IgY antibodies, raised against antigens, including proteins, including native proteins and recombinant proteins, including recombinant proteins lacking any posttranslational modification, made by or derived from microorganisms that cause dental health problems, are more effective than corresponding monoclonal antibodies raised against the same antigens. In an embodiment, the polyclonal IgY antibodies are more effective at inhibiting the adherence of dental health problem-causing microorganisms than are monoclonal antibodies raised against the same antigens as were the polyclonal antibodies.

[0049] An IgY antibody may be incorporated into a medicament, composition or formulation. When an IgY antibody according to the invention is manufactured as a medicament, the skilled person will realize that the IgY antibody may be the only active ingredient in the final medicament. However, the final medicament may contain other pharmaceutically acceptable ingredients, both inert (i.e. an “excipient”) and pharmaceutically active. Any combination of an IgY antibody and one or more of the pharmaceutically acceptable ingredients disclosed below is within the scope of the invention. When the IgY antibody is prepared as a cosmetic, excipients may be added, which will be apparent to one skilled in the art.

[0050] The IgY antibody may be administered to an animal in combination with at least one anti-microbial, preferably anti-bacterial, agent. Suitable agents include one or more compound selected from Ferric Quinate (Akeso Biomedical; “Fe-QA,” also referred to herein as “FeQ”), and ferric complexes with L-tyrosine (Fe-Tyr), L-DOPA (Fe-DOPA), L-phenyl alanine (Fe-Phe) and hydrates, salts, or derivatives thereof. The agents may also include the antibiotics tetracycline, doxycycline and ampicillin and the anti-bacterial agents triclosan (2,4,4′-trichloro 2′-hydroxy diphenyl ether) and Chlorhexidine digluconate (1,1′-hexamethylene-bis[(5-p-chlorophenyl)-biguanide]). The IgY antibody is useful in treating and preventing gum disease and associated inflammation of the gums. The IgY antibody may be administered to an animal in combination with at least one anti-inflammatory agent. Anti-inflammatory agents are well known in the art and any may be used. Preferably, the anti-inflammatory agent is a non-steroidal anti-inflammatory drug (NSAID), such as aspirin (acetylsalicylic acid) or ibuprofen. In an alternative embodiment, a steroidal anti-inflammatory agent, for example cortisone, may be used.

[0051] The IgY antibody may also be co-administered with delmopinol.

[0052] The IgY antibody can be added (including by spray or other coating techniques) to chewable dosage forms, toothpaste, dentifrice, gum, gel or mouthwash formulations. The concentration of the IgY antibody that is required will vary depending on the animal to be treated and the nature of the formation, as will be apparent to the skilled person. An example of a suitable concentration of the preferred antibody is about 25 mg antibody per dose or application.

[0053] In a particular embodiment, the compound is present in an animal chew. As used herein, the term. “chew” is given its normal meaning in the art and refers to any toy, accessory or foodstuff that is intended for chewing or gnawing by an animal. The skilled person will recognize that suitable “chew” size and composition will vary depending on the animal. Chews may be made from animal products such as hide (animal skin), tendon or bone, man-made products such as plastics (e.g. nylon) and man-made rubber, and plant products such as natural rubber. Other suitable materials for making a chew will be apparent to the skilled person. A combination of materials may be used. Preferably, the chew provides sufficient resistance to the chewing action of an animal that pressure is put on the animal's teeth. It also acts to remove debris, plaque and/or calculus by friction.

[0054] The chew may be in any shape, for example, a chew made for a cat may be in the shape of a mouse and a chew for a dog may be in the shape of a bone. In a particular embodiment, the chew is shaped so that the teeth, gums and tongue are rubbed or massaged by the chew as the animal chews it, for example the chew may have a surface containing bumps, nodules or ridges. This will aid plaque removal and encourage uniform coating of the teeth by the IgY active ingredient.

[0055] In a particular embodiment, an IgY antibody is infused into the chew, i.e. the chew material contains the IgY antibody and releases it over a sustained period. An example of a method of infusing a chew is to soak hide in a stabilizing solution or suspension containing the IgY antibody, and then allow the hide to dry. In an alternative embodiment, the chew is simply coated with a stabilized IgY antibody. The chew may be flavored with a flavoring that is appealing to the animal it is designed for. As an example, a dog chew may be flavored with meat flavors, such as chicken or beef

[0056] The IgY antibody may alternatively be incorporated into a foodstuff that does not resist the chewing or gnawing action of an animal, i.e. foodstuffs that are readily broken down by the chewing or gnawing action. Preferred examples of such foodstuffs include animal feeds (both wet and dry), more particularly animal biscuits. The IgY antibody can be incorporated into, or coated onto the surface of, such foodstuffs. The IgY antibody could also be added to the animal's usual feed.

[0057] The chew or foodstuff comprising an IgY antibody can additionally comprise any of the other medicament ingredients disclosed herein, in any combination. For example, an animal foodstuff or chew can contain an IgY antibody and one or more active or inert pharmaceutical ingredients, such as an antimicrobial agent or an anti-inflammatory agent. The chew or foodstuff could also contain delmopinol.

[0058] In one embodiment, an IgY antibody is used to remove or prevent microorganisms that cause dental carries from adhering to an animal's teeth. In such an embodiment, the IgY antibody, or composition comprising the IgY antibody will have the effect of preventing plaque formation in the oral cavity, including the teeth and gums, of an animal. Prevention of plaque formation will prevent the formation of tartar (calculus), which forms when plaque calcifies and hardens. The terms “plaque” and “calculus” are given their normal meaning in the art. For the avoidance of doubt, plaque is a bacteria-based film that can occur on oral surfaces. Calculus (also known as tartar) is a hardened deposit that can form when plaque is not removed.

[0059] The two major forms of gum disease, gingivitis and periodontitis, result from bacterial plaque formation in the oral cavity, in particular on the teeth and gums. Although long considered to be a localized infection only, gum disease is now being investigated as a potential risk factor for the development of other, potentially more serious, diseases including cardiovascular disease and pulmonary disorders.

[0060] Therefore, IgY antibodies can be used to treat (by removing plaque) and prevent (by preventing plaque formation) gum diseases such as gingivitis and periodontitis. In a preferred embodiment, the gum disease has symptoms including infected sub-gingival pockets. More preferably, the infected sub-gingival pockets are at least 4 mm deep, measured from the tip of the gum line to the apex of the pocket.

[0061] A IgY antibody can be used to treat and prevent halitosis. As used herein, the term “halitosis” refers to the commonly recognized meaning of the term, i.e. “bad breath”. This may be defined as breath that has an odor that is unpleasant or offensive to the animal exhaling the breath, or more likely to people near the animal such as the owner. In a preferred embodiment, the breath contains Volatile Sulfur Compounds (VSC's), including but not limited to hydrogen sulfide, methyl mercaptan or dimethylsulfide, or compounds such as putrescine, cadaverine, butyric and propionic acids. These compounds result from proteolytic degradation of various sulfur-containing substrates in food debris, saliva, blood and epithelial cells, by predominantly anaerobic Gram-negative microorganisms in the oral cavity.

[0062] Thus, in an embodiment, an IgY antibody can reduce the level of these compounds emitted from an animal's mouth, thereby improving the animal's breath.

[0063] A composition comprising an IgY antibody can be used purely cosmetically, to reduce and prevent staining in the oral cavity. In particular, an IgY antibody can whiten the teeth by reducing the number of stain-causing bacteria. Any combination of an IgY antibody and one or more excipients, as described herein, is within the scope of this embodiment.

[0064] For all embodiments described herein, the oral cavity is exposed to (i.e. brought into contact with) an IgY antibody. The IgY antibody is brought into contact with the oral cavity in a conventional way, in any suitable form or amount that achieves the desired effect in the oral cavity, i.e. the reduction or prevention of plaque formation, prevention or treatment of gum diseases including gingivitis and periodontitis including treatment of infected sub-gingival pockets; prevention or treatment of halitosis or teeth whitening.

[0065] In some embodiments, the IgY antibody is in the form of a chewable dosage form, an aqueous mouthwash, toothpaste, gel, gum, dentifrice or other similar preparation that will be apparent to the skilled person.

[0066] In another embodiment, the IgY antibody contacts the oral cavity via its presence on or in a chew or foodstuff, as detailed above.

[0067] In one embodiment, whichever form is suitable, the IgY or IgY-containing composition held in the mouth for at least about 5 seconds, greater than about 10 seconds, or more than about one minute, two minutes, or more than several minutes.

[0068] In a particular embodiment, mechanical agitation, preferably brushing or scraping the teeth, tongue or gums, is performed simultaneously with or shortly, preferably immediately, after contacting the oral cavity with an IgY antibody. However, mechanical agitation is not required for the IgY antibodies to be effective in maintaining the health and favorable aesthetics of an animal's oral cavity.

[0069] Simple contact of the oral cavity with an IgY antibody is sufficient for the benefits described herein to be obtained. In one embodiment, the IgY antibody is applied as an aqueous mouthwash at the start of any regular (e.g. daily) oral health routine, such as before brushing the teeth. In a particular embodiment, the mouthwash is applied as a spray or mist, for example an aerosol spray, or as droplets from a dropper bottle. In a more particular embodiment, the oral cavity is contacted with an IgY antibody shortly, preferably immediately, before contacting the oral cavity with a further agent that is helpful in maintaining good oral conditions, for example a further de-staining agent.

[0070] A method for treating (veterinary or cosmetically) any of the oral health conditions disclosed herein comprises contacting the oral cavity of an animal that displays symptoms of one or more of the conditions with an IgY antibody, in particular, a preparation, composition or formulation containing an IgY antibody such as a toothpaste, gum, gel, dentifrice, mouthwash formulation, chew or foodstuff Halitosis, plaque formation, calculus and gum disease can be prevented by contacting the oral cavity with an IgY antibody, preferably a preparation containing an IgY antibody such as a toothpaste, gum, gel, mouthwash formulation, chew or foodstuff, prior to the development of offensive odors, plaque, calculus or disease.

[0071] In one embodiment of the invention, the veterinary compositions are in the form of a soft chewable composition. In another embodiment of the invention, the oral veterinary compositions are in the form of a chewable tablet. Each of the compositions of the invention is palatable to the animal and provides for easy administration of the composition to the animal. These compositions provide surprisingly effective protection of the animals against microorganisms that compromise their oral-health, for an extended period of time, while also providing a fast onset of action.

### DEFINITIONS

[0072] Terms used herein will have their customary meaning in the art unless specified otherwise.

[0073] The term “animal” is used herein to include all mammals, birds and fish and also include all vertebrate animals. Animals include, but are not limited to, cats, dogs, cattle, chickens, turkeys, deer, goats, horses, llamas, pigs, sheep, yaks, rodents and birds. It also includes an individual animal in all stages of development, including embryonic and fetal stages. In some embodiments, the animal will be a non-human animal.

[0074] The term “oral health compromising component (OHCC)” means a component of a microorganism, including the entire microorganism itself, which plays a significant role in the establishment of oral health diseases or pathologies, including, but not solely, the establishment of dental plaque, dental caries and gingivitis.

[0075] An “immunogenic oral health compromising component (IOHCC)” is thus an OHCC that is capable of eliciting an immune response when administered to an animal. In an advantageous embodiment, immunogenic OHCCs are administered to avian animals, including hens, to elicit production of OHCC-specific IgY antibodies. These antibodies have antimicrobial activity, particularly in that they are able to block microbial adherence to oral structures including teeth. As used herein, “antimicrobial” is intended to encompass “microbiocidal,” “microbiostatic,” “anti-adhesive,” “bacteria-inhibiting,” “bacteria-blocking,” and the like, which have their ordinary meanings. Accordingly, the Antimicrobial IgY Antibodies of the instant disclosure are useful for the treatment and prevention of oral health diseases and pathologies, including, but not solely, the establishment of dental plaque, dental caries and gingivitis. IOHCC naturally include polypeptides, antigens, immunogens and epitopes.

[0076] The expression “effective amount” as used herein means a concentration of the active agent in the composition sufficient to elicit the desired biological response to the target microorganism(s) after administration of the composition to the animal, as measured by methods known in the art and/or described in the examples herein. In some embodiments, an “effective amount” of the active agent in the composition will provide an efficacy of at least 70% against the target microorganism compared to an untreated control. In other embodiments, “an effective amount” of the active agent will provide an efficacy of at least 80%, or at least 85% compared to untreated controls. More typically, “an effective amount” of the active agent will provide an efficacy of at least 90%, at least 93%, at least 95% or at least 97% against the target microorganism. In certain embodiments, including the prevention of dental disease caused by S. mutans, the term “effective amount” may provide efficacy as high as 100%.

[0077] As used herein, the terms “systemically-acting” or “systemically active” will be understood to mean that the active components are active when administered orally and may be distributed through the plasma and/or tissues of the animal treated and act on the parasite when a blood meal is taken or when the parasite comes in contact with the active agent.

[0078] As used herein, the terms “locally-acting” or “locally active” will be understood to mean that the active components are active at the site of administration, and do not become extensively (or to any extent) distributed through the plasma and/or tissues of the animals.

[0079] As used herein, the term “amylaceous ingredients” is meant those food-stuffs containing a preponderance of starch and/or starch-like material. Examples of amylaceous ingredients are cereal grains and meals or flours obtained upon grinding cereal grains such as corn, oats, wheat, milo, barley, rice, and the various milling by-products of these cereal grains such as wheat feed flour, wheat middlings, mixed feed, wheat shorts, wheat red dog, oat groats, hominy feed, and other such material. Also included as sources of amylaceous ingredients are the tuberous food stuffs such as potatoes, tapioca, and the like.

[0080] As used herein the term “palatable” means an oral veterinary composition that is readily accepted by dogs without any coaxing or with limited coaxing. Palatable compositions are compositions that are consumed by at least 75% of dogs without manual administration of the composition.

[0081] The soft chewable veterinary compositions of the invention comprising at least one IgY active agent have been found to exhibit a very fast onset of action against microorganisms that harm animals, particularly, the dental and oral health of animals. For example, in some embodiments of the invention, the soft chewable veterinary compositions of the invention provide an efficacy of at least about 15%, at least about 20% or at least about 30% against S. mutans only about 30 minutes after administration to the animal compared with untreated controls, as measured according to the methods described in the examples.

[0082] In other embodiments, the soft chewable compositions of the invention provide an efficacy of at least about 30%, at least about 40% or at least about 50% against Streptococcus spp. only about 4 hours after administration. In still other embodiments, the compositions of the invention provide an efficacy of at least about 50%, at least about 60% or at least about 70% against fleas about 8 hours after administration to the animal. In yet other embodiments, the compositions of the invention provide an efficacy of at least about 85%, at least about 90%, at least about 95% or at least about 98% about 12 hours after administration of the composition to the animal. This surprisingly fast onset of efficacy is very important for effectively treating animals with established severe dental infections.

[0083] Typically, the IgY active agents may be present in the composition at a concentration of about 0.1 to about 40% (w/w). In another embodiment, the concentration of the IgY (s) active agents is about 0.1 to about 30% (w/w). In some embodiments of the invention, the IgY active agents are present in the composition at a concentration from about 1 to about 25% (w/w), about 1 to about 20% (w/w), about 1 to about 10% (w/w), about 1 to about 5% (w/w), or about 1 to about 3% (w/w). In still other embodiments, the IgY(s) active agents are present in a concentration of about 0.1 to about 5% (w/w), about 0.5 to about 5% (w/w), about 0.5 to about 3% (w/w) or about 1 to about 3% (w/w) in the composition. In yet other embodiments, the IgY(s) active agents are present in a concentration of about 3 to about 6% (w/w), or about 5 to 10% (w/w). In other embodiments, the IgY active agent is present in a relatively higher concentration in the dosage form, including about 5% (w/w) to about 15% (w/w), about 10% (w/w) to about 20% (w/w), about 10% (w/w) to about 15% (w/w) or about 15% (w/w) to about 20% (w/w) in the composition.

[0084] Some dosage units may contain from about 0.5 mg to about 2000 mg of at least one IgY active agent or a combination of IgY active agents. In one embodiment, the IgY active is present in an amount of from about 1 mg to about 200 mg in the composition. More typically, the IgY active agent is present in an amount of about 1 mg to about 150 mg or about 10 mg to about 150 mg per chewable unit. In some embodiments, the amount of at least one IgY active agent in a dosage unit is about 5 mg to about 50 mg, bout 1 mg to about 30 mg, or about 5 mg to about 30 mg. In other embodiments, the amount of at least one IgY active agent in a dosage unit of the invention is about 1 mg to about 20 mg or about 1 mg to about 15 mg. In other embodiments, the dosage units will contain about 50 mg to about 150 mg, about 50 mg to about 100 mg, or about 75 mg to about 140 mg of at least one IgY active agent.

[0085] In other embodiments, the amount of at least one IgY active agent will be about 100 mg to about 2000 mg per dosage unit. More typically, the amount of at least one IgY active agent in a dosage unit will be about 100 mg to about 1500 mg, about 100 mg to about 1000 mg or about 500 mg to about 1200 mg per dosage unit.

### Additional Active Agents

[0086] In another aspect of the invention, oral IgY veterinary compositions, including soft chewable compositions and chewable tablet compositions, that comprise one or more locally-acting Antimicrobial IgY Antibody active agent(s) are provided. Various classes of nutraceuticals, parasiticides and the like, and may be included in the oral veterinary compositions of the invention.

[0087] In one embodiment, the invention provides a soft chewable veterinary composition comprising at least one Antimicrobial IgY Antibody active agent in combination with at least one systemically-acting active agent that is active against endoparasites, and a pharmaceutically acceptable carrier or diluent. In another embodiment, the invention provides a soft chewable veterinary composition comprising at least one Antimicrobial IgY Antibody active agent in combination with at least one systemically-acting active agent that is active against ectoparasites, together with a pharmaceutically acceptable carrier or diluent.

[0088] In some embodiments, the additional active agents combined with an Antimicrobial IgY Antibody active agent may include, but are not limited to, acaricides, anthelmintics, insecticides and other parasiticides of various classes presented herein.

[0089] In another embodiment, the soft chewable compositions may also include veterinary therapeutic agents. Veterinary pharmaceutical agents that may be included in the compositions of the invention are well-known in the art (see e.g. Plumb′ Veterinary Drug Handbook, 5th Edition, ed. Donald C. Plumb, Blackwell Publishing, (2005) or The Merck Veterinary Manual, 9th Edition, (January 2005)) and include but are not limited to co-enzyme Q10, acarbose, acepromazine maleate, acetaminophen, acetazolamide, acetazolamide sodium, acetic acid, acetohydroxamic acid, acetylcysteine, acitretin, acyclovir, albendazole, albuterol sulfate, alfentanil, allopurinol, alprazolam, altrenogest, amantadine, amikacin sulfate, aminocaproic acid, aminopentamide hydrogen sulfate, aminophylline/theophylline, amiodarone, amitriptyline, amlodipine besylate, ammonium chloride, ammonium molybdenate, amoxicillin, clavulanate potassium, amphotericin B desoxycholate, amphotericin B lipid-based, ampicillin, amprolium, antacids (oral), antivenin, apomorphione, apramycin sulfate, ascorbic acid, asparaginase, aspiring, atenolol, atipamezole, atracurium besylate, atropine sulfate, aurnofin, aurothioglucose, azaperone, azathioprine, azithromycin, baclofen, barbituates, benazepril, betamethasone, bethanechol chloride, bisacodyl, bismuth subsalicylate, bleomycin sulfate, boldenone undecylenate, bromides, bromocriptine mesylate, budenoside, buprenorphine, buspirone, busulfan, butorphanol tartrate, cabergoline, calcitonin salmon, calcitrol, calcium salts, captopril, carbenicillin indanyl sodium, carbimazole, carboplatin, carnitine, carprofen, carvedilol, cefadroxil, cefazolin sodium, cefixime, clorsulon, cefoperazone sodium, cefotaxime sodium, cefotetan disodium, cefoxitin sodium, cefpodoxime proxetil, ceftazidime, ceftiofur sodium, ceftiofur, ceftiaxone sodium, cephalexin, cephalosporins, cephapirin, charcoal (activated), chlorambucil, chloramphenicol, chlordiazepoxide, chlordiazepoxide+/−clidinium bromide, chlorothiazide, chlorpheniramine maleate, chlorpromazine, chlorpropamide, chlortetracycline, chorionic gonadotropin (HCG), chromium, cimetidine, ciprofloxacin, cisapride, cisplatin, citrate salts, clarithromycin, clemastine fumarate, clenbuterol, clindamycin, clofazimine, clomipramine, claonazepam, clonidine, cloprostenol sodium, clorazepate dipotassium, clorsulon, cloxacillin, codeine phosphate, colchicine, corticotropin (ACTH), cosyntropin, cyclophosphamide, cyclosporine, cyproheptadine, cytarabine, dacarbazine, dactinomycin/actinomycin D, dalteparin sodium, danazol, dantrolene sodium, dapsone, decoquinate, deferoxamine mesylate, deracoxib, deslorelin acetate, desmopressin acetate, desoxycorticosterone pivalate, detomidine, dexamethasone, dexpanthenol, dexraazoxane, dextran, diazepam, diazoxide (oral), dichlorphenamide, diclofenac sodium, dicloxacillin, diethylcarbamazine citrate, diethylstilbestrol (DES), difloxacin, digoxin, dihydrotachysterol (DHT), diltiazem, dimenhydrinate, dimercaprol/BAL, dimethyl sulfoxide, dinoprost tromethamine, diphenylhydramine, disopyramide phosphate, dobutamine, docusate/DSS, dolasetron mesylate, domperidone, dopamine, doramectin, doxapram, doxepin, doxorubicin, doxycycline, edetate calcium disodium.calcium EDTA, edrophonium chloride, enalapril/enalaprilat, enoxaparin sodium, enrofloxacin, ephedrine sulfate, epinephrine, epoetin/erythropoietin, eprinomectin, epsiprantel, erythromycin, esmolol, estradiol cypionate, ethacrynic acid/ethacrynate sodium, ethanol (alcohol), etidronate sodium, etodolac, etomidate, euthanasia agents w/pentobarbital, famotidine, fatty acids (essential/omega), felbamate, fentanyl, ferrous sulfate, filgrastim, finasteride, fipronil, florfenicol, fluconazole, flucytosine, fludrocortisone acetate, flumazenil, flumethasone, flunixin meglumine, fluorouracil (5-FU), fluoxetine, fluticasone propionate, fluvoxamine maleate, fomepizole (4-MP), furazolidone, furosemide, gabapentin, gemcitabine, gentamicin sulfate, glimepiride, glipizide, glucagon, glucocorticoid agents, glucosamine/chondroitin sulfate, glutamine, glyburide, glycerine (oral), glycopyrrolate, gonadorelin, grisseofulvin, guaifenesin, halothane, hemoglobin glutamer-200 (OXYGLOBIN®®), heparin, hetastarch, hyaluronate sodium, hydrazaline, hydrochlorothiazide, hydrocodone bitartrate, hydrocortisone, hydromorphone, hydroxyurea, hydroxyzine, ifosfamide, imidacloprid, imidocarb dipropinate, impenem-cilastatin sodium, imipramine, inamrinone lactate, insulin, interferon alfa-2a (human recombinant), iodide (sodium/potassium), ipecac (syrup), ipodate sodium, iron dextran, isoflurane, isoproterenol, isotretinoin, isoxsuprine, itraconazole, ivermectin, kaolin/pectin, ketamine, ketoconazole, ketoprofen, ketorolac tromethamine, lactulose, leuprolide, levamisole, levetiracetam, levothyroxine sodium, lidocaine, lincomycin, liothyronine sodium, lisinopril, lomustine (CCNU), lufenuron, lysine, magnesium, mannitol, marbofloxacin, mechlorethamine, meclizine, meclofenamic acid, medetomidine, medium chain triglycerides, medroxyprogesterone acetate, megestrol acetate, melarsomine, melatonin, meloxican, melphalan, meperidine, mercaptopurine, meropenem, metformin, methadone, methazolamide, methenamine mandelate/hippurate, methimazole, methionine, methocarbamol, methohexital sodium, methotrexate, methoxyflurane, methylene blue, methylphenidate, methylprednisolone, metoclopramide, metoprolol, metronidaxole, mexiletine, mibolerlone, midazolam milbemycin oxime, mineral oil, minocycline, misoprostol, mitotane, mitoxantrone, morphine sulfate, moxidectin, naloxone, mandrolone decanoate, naproxen, narcotic (opiate) agonist analgesics, neomycin sulfate, neostigmine, niacinamide, nitazoxanide, nitenpyram, nitrofurantoin, nitroglycerin, nitroprusside sodium, nizatidine, novobiocin sodium, nystatin, octreotide acetate, olsalazine sodium, omeprozole, ondansetron, opiate antidiarrheals, orbifloxacin, oxacillin sodium, oxazepam, oxibutynin chloride, oxymorphone, oxytretracycline, oxytocin, pamidronate disodium, pancreplipase, pancuronium bromide, paromomycin sulfate, parozetine, pencillamine, general information penicillins, penicillin G, penicillin V potassium, pentazocine, pentobarbital sodium, pentosan polysulfate sodium, pentoxifylline, pergolide mesylate, phenobarbital, phenoxybenzamine, pheylbutazone, phenylephrine, phenypropanolamine, phenytoin sodium, pheromones, parenteral phosphate, phytonadione/vitamin K-1, pimobendan, piperazine, pirlimycin, piroxicam, polysulfated glycosaminoglycan, ponazuril, potassium chloride, pralidoxime chloride, prazosin, prednisolone/prednisone, primidone, procainamide, procarbazine, prochlorperazine, propantheline bromide, propionibacterium acnes injection, propofol, propranolol, protamine sulfate, pseudoephedrine, psyllium hydrophilic mucilloid, pyridostigmine bromide, pyrilamine maleate, pyrimethamine, quinacrine, quinidine, ranitidine, rifampin, s-adenosyl-methionine (SAMe), saline/hyperosmotic laxative, selamectin, selegiline/1-deprenyl, sertraline, sevelamer, sevoflurane, silymarin/milk thistle, sodium bicarbonate, sodium polystyrene sulfonate, sodium stibogluconate, sodium sulfate, sodum thiosulfate, somatotropin, sotalol, spectinomycin, spironolactone, stanozolol, streptokinase, streptozocin, succimer, succinylcholine chloride, sucralfate, sufentanil citrate, sulfachlorpyridazine sodium, sulfadiazine/trimethroprim, sulfamethoxazole/trimethoprim, sulfadimentoxine, sulfadimethoxine/ormetoprim, sulfasalazine, taurine, tepoxaline, terbinafline, terbutaline sulfate, testosterone, tetracycline, thiacetarsamide sodium, thiamine, thioguanine, thiopental sodium, thiotepa, thyrotropin, tiamulin, ticarcilin disodium, tiletamine/zolazepam, tilmocsin, tiopronin, tobramycin sulfate, tocainide, tolazoline, telfenamic acid, topiramate, tramadol, trimcinolone acetonide, trientine, trilostane, trimepraxine tartrate w/prednisolone, tripelennamine, tylosin, urdosiol, valproic acid, vanadium, vancomycin, vasopressin, vecuronium bromide, verapamil, vinblastine sulfate, vincristine sulfate, vitamin E/selenium, warfarin sodium, xylazine, yohimbine, zafirlukast, zidovudine (AZT), zinc acetate/zinc sulfate, zonisamide and mixtures thereof

[0090] In one embodiment of the invention, arylpyrazole compounds such as phenylpyrazoles may be included in the oral veterinary compositions of the invention. The arylpyrazoles are known in the art and are suitable for combination with the isoxazoline compounds in the soft chewable compositions of the invention. Examples of such arylpyrazole compounds include but are not limited to those described in U.S. Pat. Nos. 6,001,384; 6,010,710; 6,083,519; 6,096,329; 6,174,540; 6,685,954, 6,998,131 and 7,759,381 (all of which are incorporated herein by reference). A particularly preferred arylpyrazole active agent is fipronil. In one embodiment, the arylpyrazole may be included in the soft chewable compositions in combination with one or more Antimicrobial IgY Antibody active agents, one or more macrocyclic lactones, one or more spinosyn compounds, one or more spinosoid compounds, a benzimidazole, levamisole, pyrantel, morantel, praziquantel, closantel, clorsulon, one or more amino acetonitrile active agent, one or more insect growth regulators, one or more neonicotinoids or one or more aryloazol-2-yl cyanoethylamino active agents, or a combination of thereof

[0091] In another embodiment of the invention, one or more macrocyclic lactones or lactams, which act as an acaricide, an anthelmintic agent and/or an insecticide, can be included in the compositions of the invention. The macrocyclic lactone active agents are very potent and may be included alone in the compositions or in combination with one or more Antimicrobial IgY Antibody active agents, one or more spinosyn compounds, one or more spinosoid compounds, a benzimidazole, levamisole, pyrantel, morantel, praziquantel, closantel, clorsulon, one or more amino acetonitrile active agent, one or more insect growth regulators, one or more neonicotinoids or one or more aryloazol-2-yl cyanoethylamino active agents, or a combination of thereof. Furthermore, in one embodiment, the oral veterinary compositions of the invention may comprise a combination of two or more macrocyclic lactone active agents, alone or in combination with other systemically-acting active agents. For the avoidance of doubt, the term “macrocyclic lactone” as used herein includes both naturally occurring and synthetic or semi-synthetic avermectin and milbemycin compounds.

[0092] The macrocyclic lactones that may be used in the compositions of the invention include, but are not limited to, the naturally produced avermectins (e.g. including the components designated as A1a, A1b, A2a, A2b, B1a, B1b, B2a and B2b) and milbemycin compounds, semisynthetic avermectins and milbemycins, avermectin monosaccharide compounds and avermectin aglycone compounds. Examples of macrocyclic lactone compounds that may be used in the compositions include, but are not limited to, abamectin, dimadectin, doramectin, emamectin, eprinomectin, ivermectin, latidectin, lepimectin, selamectin, ML-1,694,554 and milbemycins including, but not limited to, milbemectin, milbemycin D, milbemycin A3, milbemycin A4, milbemycin oxime, moxidectin and nemadectin. Also included are the 5-oxo and 5-oxime derivatives of said avermectins and milbemycins.

[0093] The macrocyclic lactone compounds are known in the art and can easily be obtained commercially or through synthesis techniques known in the art. Reference is made to the widely available technical and commercial literature. For avermectins, ivermectin and abamectin, reference may be made, for example, to the work “Ivermectin and Abamectin”, 1989, by M. H. Fischer and H. Mrozik, William C. Campbell, published by Springer Verlag., or Albers-Schonberg et al. (1981), “Avermectins Structure Determination”, J. Am. Chem. Soc., 103, 4216-4221. For doramectin, “Veterinary Parasitology”, vol. 49, No. 1, July 1993, 5-15 may be consulted. For milbemycins, reference may be made, inter alia, to Davies H. G. et al., 1986, “Avermectins and Milbemycins”, Nat. Prod. Rep., 3, 87-121, Mrozik H. et al., 1983, Synthesis of Milbemycins from Avermectins, Tetrahedron Lett., 24, 5333-5336, U.S. Pat. No. 4,134,973 and EP 0 677 054, both incorporated herein by reference.

[0094] The structure of the avermectins and milbemycins are closely related, e.g., by sharing a complex 16-membered macrocyclic lactone ring. The natural product avermectins are disclosed in U.S. Pat. No. 4,310,519 and the 22,23-dihydro avermectin compounds are disclosed in U.S. Pat. No. 4,199,569. Mention is also made of U.S. Pat. Nos. 4,468,390, 5,824,653, EP 0 007 812 A1, U.K. Patent Specification 1 390 336, EP 0 002 916, and New Zealand Patent No. 237 086, inter alia. Naturally occurring milbemycins are described in U.S. Pat. No. 3,950,360 as well as in the various references cited in “The Merck Index” 12th ed., S. Budavari, Ed., Merck & Co., Inc. Whitehouse Station, New Jersey (1996). Latidectin is described in the “International Nonproprietary Names for Pharmaceutical Substances (INN)”, WHO Drug Information, vol. 17, no. 4, pp. 263-286, (2003). Semisynthetic derivatives of these classes of compounds are well known in the art and are described, for example, in U.S. Pat. Nos. 5,077,308, 4,859,657, 4,963,582, 4,855,317, 4,871,719, 4,874,749, 4,427,663, 4,310,519, 4,199,569, 5,055,596, 4,973,711, 4,978,677, 4,920,148 and EP 0 667 054, all incorporated herein by reference.

[0095] In one embodiment, the oral veterinary compositions of the invention, including soft chewable compositions and chewable tablet compositions, comprise an effective amount of at least one of abamectin, dimadectin, doramectin, emamectin, eprinomectin, ivermectin, latidectin, lepimectin, selamectin, milbemectin, milbemycin D, milbemycin A3, milbemycin A4, milbemycin oxime, moxidectin or nemadectin, or a combination thereof. In another embodiment, the invention provides a soft chewable veterinary composition comprising an effective amount of at least one of abamectin, emamectin, eprinomectin, ivermectin, doramectin or selamectin, or a combination thereof. In still another embodiment, the soft chewable veterinary compositions of the invention comprise an effective amount of at least one of ivermectin, milbemectin, milbemycin oxime or moxidectin, or a combination thereof

[0096] In another embodiment, oral veterinary compositions comprising at least one Antimicrobial IgY Antibody active agent in combination with abamectin, dimadectin, doramectin, emamectin, eprinomectin, ivermectin, latidectin, lepimectin, selamectin, milbemectin, milbemycin D, milbemycin A3, milbemycin A4, milbemycin oxime, moxidectin or nemadectin, or a combination thereof, are provided. In still another embodiment, oral veterinary compositions comprising at least one Antimicrobial IgY Antibody active agent in combination with abamectin, emamectin, eprinomectin, ivermectin, doramectin or selamectin, or a combination thereof, are provided.

[0097] In yet another embodiment, soft chewable veterinary compositions comprising at least one Antimicrobial IgY Antibody active agent in combination with an effective amount of ivermectin, milbemectin, milbemycin oxime or moxidectin, or a combination thereof, are provided.

[0098] In another embodiment, the invention provides a soft chewable veterinary composition comprising an effective amount of at least one Antimicrobial IgY Antibody active agent in combination with an effective amount of abamectin, dimadectin, doramectin, emamectin, eprinomectin, ivermectin, latidectin, lepimectin, selamectin, milbemectin, milbemycin D, milbemycin A3, milbemycin A4, milbemycin oxime, moxidectin or nemadectin, or a combination thereof. In another embodiment, the invention provides a soft chewable veterinary composition comprising an effective amount of at least one Antimicrobial IgY Antibody active agent in combination with an effective amount of abamectin, emamectin, eprinomectin, ivermectin, doramectin or selamectin, or a combination thereof

[0099] In still another embodiment, the invention provides a soft chewable veterinary composition comprising an effective amount of at least one Antimicrobial IgY Antibody active agent in combination with an effective amount of at least one of ivermectin, milbemectin, milbemycin D, milbemycin A3, milbemycin A4, milbemycin oxime, moxidectin or nemadectin, or a combination thereof

[0100] In some embodiments, the chewable veterinary compositions may comprise a combination of at least one Antimicrobial IgY Antibody active agent with two different macrocyclic lactone active agents.

[0101] In still another embodiment, the invention provides a soft chewale veterinary composition comprising an effective amount of an anti-S. mutans IgY in combination with an effective amount of abamectin, emamectin, eprinomectin, ivermectin or selamectin, or a combination thereof. In yet another embodiment, the invention provides a soft chewable veterinary composition comprising an effective amount of an anti-S. mutans IgY in combination with an effective amount of ivermectin, milbemycin oxime or moxidectin, or a combination thereof.

### Formulations

[0102] In one embodiment of the invention, the soft chewable veterinary compositions are in the form of a soft chewable formulation (“soft chew”) which is palatable and acceptable to the animal. In addition to the active ingredient(s), the soft chews of the invention may include one or more of the following components: a solvent or mixture of solvents, one or more fillers, one or more binders, one or more surfactants, one or more humectants, one or more lubricants, one or more disintegrants, one or more colorants, one or more antimicrobial agents, one or more antioxidants, one or more pH modifiers and one or more flavoring agents.

[0103] Preferably, the components of the oral veterinary compositions will be classified as food grade quality or higher (e.g. USP or NF grade). The term “food grade” is used to refer to material that is suitable for consumption by animals and will not contain chemical or other agents that are hazardous to the health of the animal. Thus, a food grade component, if of animal origin, will be prepared to substantially reduce or eliminate the presence of infectious agents or contaminants by processes known in the art such as pasteurization, filtration, pressurization or irradiation. More preferably, the components of the soft chewable veterinary compositions of the invention will not be of animal origin to avoid transmission of infective agents.

[0104] Solvents that may be used in the compositions of the invention include, but are not limited to, various grades of liquid polyethylene glycol (PEG) including PEG 200, PEG 300, PEG 400 and PEG 540; propylene carbonate; propylene glycol; triglycerides including, but not limited to caprylic/capric triglyceride, caprylic/capric/linoleic triglyceride (e.g. MIGLYOL® 810 and 812, caprylic/capric/succinic triglyceride, propylene glycol dicaprylate/dicaprate, and the like; water, sorbitol solution, glycerol caprylate/caprate and polyglycolized glycerides (GELUCIRE®), or a combination thereof

[0105] Solvents may be included in the compositions in concentrations of about 1 to about 50% (w/w). In other embodiments, the concentration of the solvents will be from about 1 to about 40% (w/w), about 1 to about 30% (w/w) or about 1 to about 20% (w/w). More typically, the solvents will be in the compositions at concentrations of about 5% to about 20% (w/w) or about 5% to about 15% (w/w).

[0106] Various fillers known in the art may be used in the soft chewable compositions of the invention. Fillers include, but are not limited to, corn starch, pre-gelatinized corn starch, soy protein fines, corn cob, and corn gluten meal, and the like. In some embodiments, a combination of two or more fillers may be used in the compositions.

[0107] The starch component may comprise starch from any source and may act as a binder in the soft chew. In one embodiment, the starch component used in the compositions is unmodified. In another embodiment, the starch component is derivatized and/or pregelatinized. In another embodiment, the starch component is highly derivatized. Some starches that can serve as a base starch for derivatization include regular corn, waxy corn, potato, tapioca, rice, etc. Suitable types of derivatizing agents for the starch include, but are not limited to, ethylene oxide, propylene oxide, acetic anhydride, and succinic anhydride, and other food approved esters or ethers, introducing such chemicals alone or in combination with one another.

[0108] In various embodiments, prior cross-linking of the starch in the starch component may or may not be necessary, based on the pH of the system and the temperature used to form the product.

[0109] The starch component may also include amylaceous ingredients. The amylaceous ingredients can be gelatinized or cooked before or during the forming step to achieve the desired matrix characteristics. If gelatinized starch is used, it may be possible to prepare the product of the subject invention or perform the process of the subject invention without heating or cooking. However, ungelatinized (ungelled) or uncooked starch may also be used.

[0110] Fillers are typically present in the compositions at a concentration of about 5% to about 80% (w/w), about 10% to about 70% (w/w), about 10% to about 60%, about 10% to about 50% (w/w), or about 10% to about 40% (w/w). More typically, the fillers may be present at concentrations of about 30% to about 70%, about 30% to about 60%, about 30% to about 50% or about 35% to about 55%.

[0111] Binders that may be used in the compositions of the invention include, but are not limited to, polyvinylpyrrolidone (e.g. Povidone), cross-linked polyvinylpyrrolidone (Crospovidone), polyethylene glycols of various grades including PEG 3350, PEG 4000, PEG 6000, PEG 8000 and even PEG 20,000, and the like; co-polymers of vinylpyrrolidone and vinyl acetate (e.g. Copovidone) such as the product sold by BASF by the tradename Kollidon® VA 64 and the like; starch such as potato starch, tapioca starch or corn starch; molasses, corn syrup, honey, maple syrup and sugars of various types; or a combination of two or more binders. In one embodiment, the composition comprises the binders Povidone K30 LP and PEG 3350 or PEG 4000, or a combination thereof. Binders are typically present in the compositions at a concentration of about 1% to about 30% (w/w). More typically, the compositions will include binders at a concentration of about 1% to about 20% (w/w), about 1 to about 15% (w/w), about 1% to about 10% (w/w), about 5% to about 15% (w/w) or about 5% to about 10% (w/w).

[0112] Humectants that may be used in the compositions include, but are not limited to, glycerol (also referred to herein as glycerin), propylene glycol, cetyl alcohol and glycerol monostearate, and the like. Polyethylene glycols of various grades may also be used as humectants.

[0113] In some embodiments, the humectant may comprise more than one oil including, but not limited to, fat or fats, both natural and synthetic. Oil employed as an ingredient in the soft chew may be a saturated or unsaturated liquid fatty acid, its glyceride derivatives or fatty acid derivatives of plant or animal origin or a mixture thereof. A source for typical animal fats or oils are fish oil, chicken fat, tallow, choice white grease, prime steam lard and mixtures thereof. However, other animal fats are also suitable for use in the soft chew. Suitable sources for vegetable fats or oils can be derived palm oil, palm hydrogenated oil, corn germ hydrogenated oil, castor hydrogenated oil, cotton-seed oil, soybean oil, olive oil, peanut oil, palm olein oil, Cacao fat, margarine, butter, shortening and palm stearin oil, and mixtures thereof. Additionally, a mixture of animal or vegetable oils or fats is suitable for use in the matrix.

[0114] Humectants may typically present in the compositions at a concentration of about 1% to about 25% (w/w). Typically, the concentration of the humectant in the composition of the invention will be 1% to about 20% (w/w), about 1% to about 15% (w/w) or about 5% to about 15% (w/w). More typically, the compositions of the invention will contain about 1% to about 10% (w/w) humectant.

[0115] Surfactants may be present in the composition at concentrations of about 0.1% to about 10% (w/w), about 1% to about 10% (w/w) or about 5% to about 10% (w/w). More typically, surfactants may be present at concentrations of about 0.1% to about 5% (w/w) or about 1 to about 5% (w/w). Examples of surfactants that may be used in the compositions include, but are not limited to, glyceryl monooleate, polyoxyethylene sorbitan fatty acid esters, sorbitan esters including sorbitan monooleate (Span® 20), polyvinyl alcohol, polysorbates including polysorbate 20 and polysorbate 80, d-α-tocopheryl polyethylene glycol 1000 succinate (TPGS), sodium lauryl sulfate, co-polymers of ethylene oxide and propylene oxide (e.g. poloxamers such as LUTROL® F87 and the like), polyethylene glycol castor oil derivatives including polyoxyl 35 castor oil (Cremophor® EL), polyoxyl 40 hydrogenated castor oil (Cremophor® RH 40), polyoxyl 60 hydrogenated castor oil (Cremophor® RH60); propylene glycol monolaurate (LAUROGLYCOL®); glyceride esters including glycerol caprylate/caprate (CAPMUL® MCM), polyglycolized glycerides (GELUCIRE®), PEG 300 caprylic/capric glycerides (Softigen® 767), PEG 400 caprylic/capric glycerides (Labrasol®), PEG 300 oleic glycerides (Labrafil® M-1944CS), PEG 300 linoleic glycerides (Labrafil® M-2125CS); polyethylene glycol stearates and polyethylene glycol hydroxy stearates including polyoxyl 8 stearate (PEG 400 monostearate), polyoxyl 40 stearate (PEG 1750 monostearate, and the like. Polyethylene glycol stearates (synonyms include macrogol stearates, polyoxylstearates, polyoxyethylene stearates, ethoxylated stearates; CAS No. 9004-99-3, 9005-08-7) are mixtures of mono- and distearate esters of mixed polyoxyethylene polymers. Polyethylene glycol hydroxystearate is a mixture of mono- and diesters of hydroxystearic acid with polyethylene glycols. One polyethylene glycol hydroxystearate that may be used in the compositions is polyethylene glycol 12-hydroxystearate. In another embodiment, the compositions may include the surfactant polyethylene glycol 15 12-hydroxystearate (Solutol® HS 15 from BASF), a mixture of mono- and diesters of 12-hydroxystearic acid with 15 moles of ethylene oxide. Again, these compounds, as well as their amounts are well known in the art. In another embodiment of the invention, the compositions may include polyoxyl 35 castor oil (Cremophor® EL) as a surfactant. In other embodiments, the chewable compositions may include polyoxyl 40 hydrogenated castor oil (Cremophor® RH 40) or polyoxyl 60 hydrogenated castor oil (Cremophor® RH60) as surfactants. The compositions of the invention may also include a combination of surfactants.

[0116] The type and nature of the surfactant has been found to be very important in keeping the active agent(s) in solution after ingestion and dissolution of the oral compositions. This is particularly important for obtaining the very high bioavailability observed from the inventive oral compositions. However, it has been found that inclusion of certain surfactants with the veterinary dosage forms adversely affect the palatability of the dosage form, resulting in low acceptance by the animals treated. In one embodiment, polyethylene glycol 15 hydroxystearate, polyoxyl 40 hydrogenated castor oil or polyoxyl 60 hydrogenated castor oil, are effective for solubilizing active agents with low water solubility including, but not limited to, isoxazoline active agents and the like, after ingestion by the animal while also maintaining the palatability of the oral dosage form. Thus, in one embodiment of the invention, the oral veterinary compositions comprise Polyethylene glycol 15 hydroxystearate, polyoxyl 40 hydrogenated castor oil or polyoxyl 60 hydrogenated castor oil. In another embodiment of the invention, the veterinary soft chewable compositions of the invention comprise Polyethylene glycol 15 hydroxystearate, polyoxyl 40 hydrogenated castor oil or polyoxyl 60 hydrogenated castor oil at a concentration of about 1 to about 5% (w/w).

[0117] In some embodiments, the compositions of the invention may contain one or more disintegrants. Examples of disintegrants that may be used in the compositions of the invention include, but are not limited to, cellulose, carboxymethyl cellulose calcium, carboxymethyl cellulose sodium, polacrilin potassium, starch, hydroxypropyl starch, corn starch, pregelatinized starch, modified starch, lactose monohydrate, croscarmellose sodium, hydroxypropyl cellulose, glycine, Crospovidone, magnesium aluminum silicate, sodium starch glycolate, guar gum, colloidal silicon dioxide, polyvinylpyrrolidone (Povidone), alginic acid, sodium alginate, calcium alginate, methylcellulose, chitosan, and the like, or a combination thereof

[0118] In certain embodiments, the oral veterinary compositions of the invention will include up to about 10% (w/w) of one or more disintegrants. In one embodiment, the compositions may include about 1% (w/w) to about 7% (w/w) of one or more disintegrants. In another embodiment, the compositions may include about 1% (w/w) to about 5% (w/w) or about 2% (w/w) to about 4% (w/w) of one or more disintegrants.

[0119] The inventive formulations may contain other inert ingredients such as antioxidants, preservatives, or pH stabilizers. These compounds are well known in the formulation art. Antioxidants may be added to the compositions of the invention to inhibit degradation of the active agents. Suitable antioxidants include, but are not limited to, alpha tocopherol, ascorbic acid, ascorbyl palmitate, fumaric acid, malic acid, sodium ascorbate, sodium metabisulfate, n-propyl gallate, BHA (butylated hydroxy anisole), BHT (butylated hydroxy toluene) monothioglycerol and the like. The antioxidants are generally added to the formulation in amounts of from about 0.01 to about 2.0% (w/w), based upon total weight of the formulation, with about 0.05 to about 1.0% or about 0.1% to about 0.2% (w/w) being especially preferred.

[0120] The compositions of the invention may also include one or more lubricants/processing aids. In some cases, the lubricant/processing aid may also behave as a solvent, and accordingly, there some of the components of the inventive compositions may have dual functions. Lubricants/processing aids include, but are not limited to polyethylene glycols of various molecular weight ranges including PEG 3350 (Dow Chemical) and PEG 4000, corn oil, mineral oil, hydrogenated vegetable oils (STEROTEX or LUBRITAB), peanut oil and/or castor oil. In certain embodiments, the lubricant/processing aid is a neutral oil comprising a medium chain triglyceride or propylene glycol fatty acid esters including caprylic/capric triglycerides. Non-limiting examples of neutral oils are known by the trademark MIGLYOL® including MIGLYOL® 810, MIGLYOL® 812, MIGLYOL® 818, MIGLYOL® 829 and MIGLYOL® 840. If present, the lubricant/processing aid may be in the composition at a concentration of about 1% to about 20% (w/w). Typically, the lubricant/processing aid will be present at a concentration of about 1% to about 15% (w/w) or about 1% to about 10% (w/w). Preferably, the lubricant/processing aid will be present in the composition at a concentration of about 1% to about 5% (w/w).

[0121] The compositions may also include anti-microbial agents or preservatives. Suitable preservatives include, but are not limited to, the parabens (methylparaben and/or propylparaben), benzalkonium chloride, benzethonium chloride, benzoic acid, benzyl alcohol, bronopol, butylparaben, cetrimide, chlorhexidine, chlorobutanol, chlorocresol, cresol, ethylparaben, imidurea, methylparaben, phenol, phenoxyethanol, phenylethyl alcohol, phenylmercuric acetate, phenylmercuric borate, phenylmercuric nitrate, potassium sorbate, sodium benzoate, sodium propionate, sorbic acid, thimerosal, and the like. The concentration of the preservatives in the compositions of the invention are typically from about 0.01 to about 5.0% (w/w), about 0.01 to about 2% (w/w) or about 0.05 to about 1.0% (w/w). In one embodiment, the compositions of the invention will contain about 0.1% to about 0.5% (w/w) of the preservative.

[0122] In an embodiment, the oral veterinary compositions of the invention may contain one or more stabilizers to stabilize active ingredients that are susceptible. Suitable stabilizer components include, but are not limited to, magnesium stearate, citric acid, sodium citrate, and the like. However, stabilizer components are common in the art and any suitable one or mixture of more than one may be used. In an embodiment, a stabilizer component comprises about 0.0 percent to about 3.0 percent of the soft chew. In an alternate embodiment, a stabilizer component comprises about 0.5 percent to about 1.5 percent of the soft chew.

[0123] Compounds which stabilize the pH of the formulation are also contemplated in the compositions of the invention. Again, such compounds are well known to a practitioner in the art as well as how to use these compounds. Buffering systems include, for example, systems selected from acetic acid/acetate, malic acid/malate, citric acid/citrate, tartaric acid/tartrate, lactic acid/lactate, phosphoric acid/phosphate, glycine/glycimate, tris, glutamic acid/glutamates and sodium carbonate. In one embodiment, the compositions may include the pH modifier citric acid or a citric acid/citrate combination. The amount of the pH modifier required to achieve a desired pH depends on the nature of the active ingredient(s) and non-active excipients. However, in some embodiments the pH modifier may typically be present in an amount of about 0.1 to about 5% (w/w), about 0.1 to about 3% (w/w) or about 0.1 to about 2% (w/w). More typically, the pH modifier may be present in a concentration of about 0.1 to 1% (w/w) in the inventive compositions.

[0124] Many flavoring agents may be used in the compositions of the invention to improve the palatability of the oral veterinary formulations. Preferred flavoring agents are those that are not derived from animal sources. In various embodiments, flavoring components derived from fruit, meat (including, but not limited to pork, beef, chicken, fish, poultry, and the like), vegetable, cheese, bacon, cheese-bacon and/or artificial flavorings may be used. A flavoring component is typically chosen based upon consideration related to the organism that will be ingesting the soft chew. For example, a horse may prefer an apple flavoring component, while a dog may prefer a meat flavoring component. Although flavoring components derived from non-animal sources are preferred, in some embodiments, natural flavors containing beef or liver extracts, etc., may be used such as braised beef flavor artificial powdered beef flavor, roast beef flavor and corned beef flavor among others.

[0125] Non-animal flavoring agents include, but are not limited to, artificial beef flavors, flavors derived from plant proteins such as soy protein to which artificial flavoring has been added (e.g. soy-derived bacon flavoring), and flavors derived from plant proteins such as soy protein with no artificial flavoring.

[0126] Artificial beef flavors may be obtained from a variety of sources including Pharma Chemie Inc., TetraGenx, Givaudan S. A., Firmenich, Kemin Industries, Inc., International Flavors & Fragrances Inc., among others.

[0127] In another embodiment, the flavoring component include, but is not limited to, strawberry flavor, tutti fruity flavor, orange flavor, banana flavor, mint flavor, and an apple-molasses.

[0128] For administration to cattle, sheep, horses and other grazing animals, as well as small animals such as rabbits, hamsters, gerbils, and guinea pigs, grains and seeds are especially appealing additional flavoring agents. The grains may be present in any form consistent with the production of the chew including flour, bran, cereal, fiber, whole grain and meal forms, including gluten meals, and may be rolled, crimped, ground, dehydrated or milled. Minerals may also be added as flavorings, such as salt and other spices. In one embodiment, the grain utilized is dehydrated, milled or flaked. Vegetables such as dehydrated carrots and seeds such as safflower seeds or milo seeds are especially appealing to small animals and may be included. Additionally, flavors such as Sweet Apple and Molasses Flavor Base and others produced by Pharma Chemie, Givaudan S. A. or other suppliers may be utilized in the compositions.

[0129] The compositions of the invention may include one or more flavoring agents in an amount that provides the desired level of palatability to the target animal. The one or more flavoring agents will typically be present in a concentration of about 5% to about 40% (w/w). More typically, the flavoring agents will be present in a concentration of about 10% to about 30%, or about 15% to about 25% (w/w).

[0130] In one embodiment, the soft chewable compositions of the invention comprise one or more solvents described above, one or more fillers described above, one or more binders described above, one or more humectants described above, one or more surfactants described above, one or more flavors described above, one or more lubricants described above, and optionally one or more disintegrants described above, one or more preservatives described above, one or more stabilizers described above, one or more antioxidants described above and one or more pH modifying agents described above.

[0131] In another embodiment, the compositions may comprise one or more solvents selected from various grades of liquid polyethylene glycol (PEG) including PEG 200, PEG 300, PEG 400 and PEG 540; propylene carbonate, propylene glycol; triglycerides including, but not limited to caprylic/capric triglyceride, caprylic/capric/linoleic triglyceride, caprylic/capric/succinic triglyceride, propylene glycol dicaprylate/dicaprate, glycerol caprylate/caprate and polyglycolized glycerides, or a combination thereof; one or more fillers selected from corn starch, pre-gelatinized corn starch, soy protein fines, corn cob, and corn and gluten meal, or a combination thereof; one or more flavors selected from natural and/or artificial pork, beef, fish or poultry flavor, or a combination thereof; one or more binders selected from polyvinylpyrrolidone (e.g. Povidone), cross-linked polyvinylpyrrolidone (Crospovidone), polyethylene glycols of various grades including PEG 3350, PEG 4000, PEG 6000, PEG 8000 and PEG 20,000; and co-polymers of vinylpyrrolidone and vinyl acetate (e.g. Copovidone), or a combination thereof; and one or more surfactants selected from glyceryl monooleate, polyoxyethylene sorbitan fatty acid esters, sorbitan esters including sorbitan monooleate, polyvinyl alcohol, polysorbates including polysorbate 20 and polysorbate 80, d-α-tocopheryl polyethylene glycol 1000 succinate, sodium lauryl sulfate, co-polymers of ethylene oxide and propylene oxide, polyethylene glycol castor oil derivatives including polyoxyl 35 castor oil, polyoxyl 40 hydrogenated castor oil and polyoxyl 60 hydrogenated castor oil; propylene glycol monolaurate; glyceride esters including glycerol caprylate/caprate, polyglycolized glycerides, PEG 300 caprylic/capric glycerides, PEG 400 caprylic/capric glycerides, PEG 300 oleic glycerides, PEG 300 linoleic glycerides; polyethylene glycol stearates and polyethylene glycol hydroxy stearates including polyoxyl 8 stearate, polyoxyl 40 stearate and polyethylene glycol 15 12-hydroxystearate, or a combination thereof; and optionally one or more humectants described above, one or more lubricants described above, one or more preservatives describe above, one or more stabilizers described above, one or more antioxidants described above and one or more pH modifiers described above.

[0132] In another embodiment, the compositions comprise one or more solvents selected from various grades of liquid polyethylene glycol including PEG 300, PEG 400 and PEG 540; propylene carbonate; propylene glycol; caprylic/capric triglyceride, caprylic/capric/linoleic triglyceride, propylene glycol dicaprylate/dicaprate and glycerol caprylate/caprate, or a combination thereof; one or more fillers selected from corn starch, pre-gelatinized corn starch, soy protein fines, or a combination thereof; one or more flavors selected from natural and/or artificial pork, beef, fish or poultry flavor, or a combination thereof; one or more binders selected from polyvinylpyrrolidone, cross-linked polyvinylpyrrolidone, polyethylene glycols of various grades including PEG 3350, PEG 4000, PEG 6000 and PEG 8000; and co-polymers of vinylpyrrolidone and vinyl acetate, or a combination thereof; one or more humectants selected from glycerol, propylene glycol, cetyl alcohol and glycerol monostearate, or a combination thereof; and one or more surfactants selected from polyoxyethylene sorbitan fatty acid esters, sorbitan esters including sorbitan monooleate, polysorbates including polysorbate 20 and polysorbate 80, co-polymers of ethylene oxide and propylene oxide, polyethylene glycol castor oil derivatives including polyoxyl 35 castor oil, polyoxyl 40 hydrogenated castor oil and polyoxyl 60 hydrogenated castor oil; propylene glycol monolaurate; PEG 300 caprylic/capric glycerides, PEG 400 caprylic/capric glycerides, PEG 300 oleic glycerides, PEG 300 linoleic glycerides; polyethylene glycol stearates and polyethylene glycol hydroxy stearates including polyoxyl 8 stearate, polyoxyl 40 stearate and polyethylene glycol 15 12-hydroxystearate, or a combination thereof; and optionally one or more lubricants described above, one or more preservatives described above, one or more stabilizers described above, one or more antioxidants described above and one or more pH modifiers described above.

[0133] In yet another embodiment, the soft chewable compositions of the invention comprise one or more solvents selected from liquid polyethylene glycols including PEG 200, PEG 300 and PEG 400; caprylic/capric triglyceride and propylene glycol dicaprylate/dicaprate, or a combination thereof; one or more fillers selected from corn starch, pre-gelatinized corn starch and soy protein fines, or a combination thereof; one or more flavors selected from natural and/or artificial beef, fish or poultry flavor, or a combination thereof; one or more binders selected from polyvinylpyrrolidone, cross-linked polyvinylpyrrolidone, polyethylene glycols of various grades including PEG 3350, PEG 4000 and PEG 6000; and co-polymers of vinylpyrrolidone and vinyl acetate, or a combination thereof; one or more humectants selected from glycerol, propylene glycol and cetyl alcohol, or a combination thereof; and one or more surfactants selected from polyoxyethylene sorbitan fatty acid esters, sorbitan esters including sorbitan monooleate, polysorbates including polysorbate 20 and polysorbate 80, polyethylene glycol castor oil derivatives including polyoxyl 35 castor oil, polyoxyl 40 hydrogenated castor oil and polyoxyl 60 hydrogenated castor oil; PEG 300 caprylic/capric glycerides, PEG 400 caprylic/capric glycerides and polyethylene glycol stearates and polyethylene glycol hydroxy stearates including polyoxyl 8 stearate, polyoxyl 40 stearate and polyethylene glycol 15 12-hydroxystearate, or a combination thereof; one or more lubricants selected from polyethylene glycols of various molecular weight ranges including PEG 3350 and PEG 4000, hydrogenated vegetable oils, castor oil, a medium chain triglyceride including caprylic/capric triglycerides and propylene glycol fatty acid esters, or a combination thereof; and optionally one or more preservatives described above, one or more stabilizers described above, one or more antioxidants described above and one or more pH modifiers described above.

[0134] In another embodiment, the soft chewable compositions of the invention comprise one or more solvents selected from liquid polyethylene glycols including PEG 300 and PEG 400; caprylic/capric triglyceride and propylene glycol dicaprylate/dicaprate, or a combination thereof; one or more fillers selected from corn starch, pre-gelatinized corn starch and soy protein fines, or a combination thereof; one or more flavors selected from natural and/or artificial beef, fish or poultry flavor, or a combination thereof; one or more binders selected from polyvinylpyrrolidone and polyethylene glycols of various grades including PEG 3350, PEG 4000 and PEG 6000, or a combination thereof; one or more humectants selected from glycerol, propylene glycol and cetyl alcohol, or a combination thereof; and one or more surfactants selected from sorbitan esters including sorbitan monooleate, polysorbates including polysorbate 20 and polysorbate 80, polyethylene glycol castor oil derivatives including polyoxyl 40 hydrogenated castor oil and polyoxyl 60 hydrogenated castor oil; PEG 400 caprylic/capric glycerides and polyethylene glycol stearates and polyethylene glycol hydroxy stearates including polyoxyl 8 stearate, polyoxyl 40 stearate and polyethylene glycol 15 12-hydroxystearate, or a combination thereof; one or more lubricants selected from polyethylene glycols of various molecular weight ranges including PEG 3350 and PEG 4000, caprylic/capric triglycerides and propylene glycol fatty acid esters, or a combination thereof; and optionally one or more preservatives described above, one or more stabilizers described above, one or more antioxidants described above and one or more pH modifiers described above.

[0135] In still another embodiment, the soft chewable compositions of the invention comprise one or more solvents selected from liquid polyethylene glycols including PEG 300 and PEG 400; caprylic/capric triglyceride and propylene glycol dicaprylate/dicaprate, or a combination thereof, at a concentration of about 1-20% (w/w) or about 5-20% (w/w); one or more fillers selected from corn starch, pre-gelatinized corn starch and soy protein fines, or a combination thereof, at a concentration of about 30-60% (w/w) or about 30-50% (w/w); one or more flavors selected from natural and/or artificial beef, fish or poultry flavor, or a combination thereof, at a concentration of about 10-30% (w/w) or about 15-25% (w/w); one or more binders selected from polyvinylpyrrolidone and polyethylene glycols of various grades including PEG 3350, PEG 4000 and PEG 6000, or a combination thereof, at a concentration of about 1-10% (w/w) or about 5-15% (w/w); one or more humectants selected from glycerol and propylene glycol, or a combination thereof, at a concentration of about 1-15% (w/w) or about 5-15% (w/w); and one or more surfactants selected from sorbitan esters including sorbitan monooleate, polysorbates including polysorbate 20 and polysorbate 80, polyethylene glycol castor oil derivatives including polyoxyl 40 hydrogenated castor oil and polyoxyl 60 hydrogenated castor oil; PEG 400 caprylic/capric glycerides and polyethylene glycol stearates and polyethylene glycol hydroxy stearates including polyoxyl 8 stearate, polyoxyl 40 stearate and polyethylene glycol 15 12-hydroxystearate, or a combination thereof, at a concentration of about 1-5% (w/w) or about 5-10% (w/w); one or more lubricants selected from polyethylene glycols of various molecular weight ranges including PEG 3350 and PEG 4000, caprylic/capric triglycerides and propylene glycol fatty acid esters, or a combination thereof, at a concentration of about 1-10% (w/w) or about 1-5% (w/w); and optionally one or more preservatives described above, one or more stabilizers described above, one or more antioxidants described above and one or more pH modifiers described above.

[0136] In another embodiment, the soft chewable compositions of the invention comprise one or more solvents selected from liquid polyethylene glycols including PEG 300 and PEG 400; and caprylic/capric triglyceride, or a combination thereof, at a concentration of about 5-20% (w/w); one or more fillers selected from corn starch, pre-gelatinized corn starch and soy protein fines, or a combination thereof, at a concentration of about 30-50% (w/w); one or more flavors selected from natural and/or artificial beef, fish or poultry flavor, or a combination thereof, at a concentration of about 15-25% (w/w); one or more binders selected from polyvinylpyrrolidone and polyethylene glycols of various grades including PEG 3350, PEG 4000 and PEG 6000, or a combination thereof, at a concentration of about 5-15% (w/w); one or more humectants selected from glycerol and propylene glycol, or a combination thereof, at a concentration of about 5-15% (w/w); and one or more surfactants selected from polysorbates including polysorbate 20 and polysorbate 80, polyethylene glycol castor oil derivatives including polyoxyl 40 hydrogenated castor oil and polyoxyl 60 hydrogenated castor oil; PEG 400 caprylic/capric glycerides and polyethylene glycol stearates and polyethylene glycol hydroxy stearates including polyoxyl 8 stearate, polyoxyl 40 stearate and polyethylene glycol 15 12-hydroxystearate, or a combination thereof, at a concentration of about 1-5% (w/w) or about 5-10% (w/w); one or more lubricants selected from polyethylene glycols of various molecular weight ranges including PEG 3350 and PEG 4000 and caprylic/capric triglycerides, or a combination thereof at a concentration of about 1-5% (w/w); and optionally one or more preservatives described above, one or more stabilizers described above, one or more antioxidants described above and one or more pH modifiers described above.

[0137] In another embodiment, the oral veterinary compositions of the invention are in the form of a chewable tablet. The tablet compositions will comprise an effective amount of at least one systemically-acting active agent described herein, and typically a flavor, a filler, a lubricant, and a flow aid. Optionally, the inventive tablets may further contain at least one of the following ingredients: colorants, binders, antioxidants, disintegrants, or preservatives. Moreover, in an alternative embodiment the invention provides for tablets which are coated. The inventive tablets are prepared according to methods conventional in the art, such as wet and dry granulation processes.

[0138] Many of the ingredients for the tablet include those provided for in the soft chewable formulations described above. With respect to fillers (or diluents), the inventive tablets contemplate all the fillers which are known in the tablet art. Non-limiting examples of fillers include anhydrous lactose, hydrated lactose, sprayed dried lactose, crystalline maltose and maltodextrins.

[0139] Flow aids or glidants are also well known in the art and include, for example, silicon dioxide (CARBOSIL) or silica gel (SYLOID), talc, starch, calcium, stearate, magnesium stearate, and aluminum magnesium silicate (NEUSILIN). Amounts of flow aids are readily determined by a practitioner in this art and include for using about 0.01 to about 25%, based upon weight of total composition. Non-limiting examples of lubricants for the tablets include magnesium and calcium stearate and stearic acid. Again, the various lubricants are well known to a practitioner of this art as well as the amounts of these compounds. Ranges include from about 0.01 to about 20% (w/w).

[0140] In various embodiments, the oral compositions of the invention may be coated. Any suitable coating may be used. In an embodiment, a coating is chosen that will not interfere with an additive. In another embodiment, an additive is chosen that can modify the time for digestion of the additive(s), thereby at least partially controlling the release of the additive(s). Suitable coatings include, but are not limited to, and may be any pharmaceutically acceptable, and/or neutraceutically acceptable coating, as is common in the art. (polymers, monomers). Reference can be had to U.S. Pat. No. 6,498,153, incorporated herein by reference, to Cady et al. for a list of polymers that can function as coatings.

[0141] In other embodiments, coatings for the oral veterinary formulations include gelatin, glyceryl behenate, cocoa butter, and beeswax. Other coatings would be known to a practitioner in this art. Coatings for tablets include sugar coatings, such as seal coatings, subcoatings, and syrup coatings, as well as film coatings, such as pan-pour coatings and pan spray coatings. As well known to a practitioner of this art, the coatings contain additional components such as solvents, plasticizers, colorants, opaquant-extenders and film formers.

### Method of Manufacture

[0142] The soft chews of the invention are prepared by mixing the active ingredient(s) with the non-active excipients in a mixer and mixing the components to achieve a dough-like mixture wherein the active ingredient(s) are homogeneously distributed. The resulting dough-like mixture is then formed into soft chewable dosage units of different sizes for different size animals.

[0143] In one embodiment, the process to manufacture the soft chews will not include the addition of water, although there may be some amount of water included with certain components used. The presence of significant amounts of water in veterinary compositions is known to affect the stability of certain active agents. Thus, in certain embodiments of the invention water will not be added to the composition where active agents and/or excipients are used that are susceptible to degradation in the presence of water.

[0144] The temperature at which the soft chewable veterinary compositions of the invention are prepared is dependent on the stability requirements of the active and non-active components of the compositions. In certain cases where ingredients that are not temperature-sensitive are used, higher processing temperatures may be tolerable. However, when active and non-active ingredients are used that are sensitive to temperature, the process may be adapted to operate at a temperature range that will not adversely impact the stability of the composition. In some embodiments, the process will preferably not impart significant amounts of heat during any one processing step to avoid the possible degradation of any of the components of the composition. Thus, in some embodiments, any one step of the process may be operated so that the average temperature of the mixture does not rise more than about 20° C. above room temperature (room temperature will be considered 20-25° C.). In other embodiments, the process will be conducted so that the average temperature of the mixture does not rise more than about 15° C., more than about 10° C. or more than about 5° C. above room temperature. In still another embodiment, the process may be conducted so that the average temperature of the mixture will not rise more than about 3° C. above room temperature. In some embodiments, the required temperature may be maintained by the use of process cooling devices. In other embodiments, the required temperature may be maintained by using equipment that does not produce sufficient heat to maintain the required temperature of the mixture during processing.

[0145] In one embodiment, active and inactive ingredients for the soft chews of the invention are added to a mixing vessel such as a planetary or double planetary mixer or a horizontal mixer capable of blending the material and casting it against the side of the mixing vessels. This action permits the ingredients to be well and consistently blended without application of heat or addition of pharmaceutical grade water to the mixture.

[0146] Horizontal mixers generally comprise a mixing chamber, an elongated, horizontal mixing shaft which rotates, and a plurality of mixing tools which depend generally perpendicularly from the horizontal shaft to rotate around the inside of the chamber (see, e.g., U.S. Pat. No. 5,735,603, the disclosure of which is incorporated herein by this reference). The mixing tools are configured and dimensioned as required for the mixing process to follow the shape of the chamber walls as rotated for proper mixing of all of material present. Some such mixing chambers are cylindrically shaped, while others are trough-shaped, such as mixers which are commonly referred to in the art as double-arm mixers or ribbon mixers.

[0147] In one embodiment, the soft chewable compositions of the invention may be formed from the dough-like mixture by any suitable forming techniques known in the art including forming by hand. One of skill in the art will understand that once the homogeneous dough mixture having the required properties is prepared the individual dosage units of various sizes may be formed by weighing the required amount of the dough-like mixture and forming the soft chewable compositions by hand or using any other molding techniques known in the art. In one embodiment, the dough-like mixture is extruded to form the soft chewable dosage forms. In another embodiment, the soft chewable dosage forms are formed using a forming machine. A variety of forming equipment may be utilized in the invention including molding machines developed for use in producing molded food products, such as pre-formed hamburger patties and chicken nuggets. For example, the molding machines described in U.S. Pat. Nos. 3,486,186; 3,887,964; 3,952,478; 4,054,967; 4,097,961; 4,182,003; 4,334,339; 4,338,702; 4,343,068; 4,356,595; 4,372,008; 4,523,520; 4,535,505; 4,597,135; 4,608,731; 4,622,717; 4,697,308; 4,768,941; 4,780,931; 4,818,446; 4,821,376; 4,872,241; 4,975,039; 4,996,743; 5,021,025; 5,022,888; 5,165,218; 5,655,436; 5,980,228 and 7,780,931 (the disclosures of which are incorporated herein by reference) are representative of forming equipment that may be utilized in the invention.

[0148] In one embodiment forming equipment that does not apply compression heat to the chew mixture may be utilized. Non-limiting examples of forming machines include those manufactured by NuTec Manufacturing including model nos. 710, 720, 745, 750 and 760; and those manufactured by the Formax Corporation, including the VerTex 1000, NovaMax 500, Maxum 700, Ultra 26, F-19, F-400 and F-6. The order of mixing the components is not critical and various processing schemes may be used to form the dough-like mixture prior to forming the soft chew dosage units. In some embodiments, the active ingredient(s) and possibly some non-active components such as preservatives or antioxidants may first be dissolved in a solvent(s) prior to mixing with other non-active components of the composition in a blender to form a dough-like mixture. The liquid components may be added at a controlled rate to ensure homogeneity of the mixture. Alternatively, the active ingredient(s) may be mixed in dry form (solid state) with other non-active components in a blender and liquid components may be added to the dry blended mixture with further mixing to form a uniform dough-like mixture. In still another embodiment, the liquid components of the invention may first be placed in the blender and the dry components, including active agent(s) may be added to the liquid with further mixing to form a uniform dough-like mixture.

[0149] Accordingly, it is an object of the invention to not encompass within the invention any previously known product, process of making the product, or method of using the product such that Applicants reserve the right and hereby disclose a disclaimer of any previously known product, process, or method. It is further noted that the invention does not intend to encompass within the scope of the invention any product, process, or making of the product or method of using the product, which does not meet the written description and enablement requirements of the USPTO (35 U.S.C. §112, first paragraph) or the EPO (Article 83 of the EPC), such that Applicants reserve the right and hereby disclose a disclaimer of any previously described product, process of making the product, or method of using the product.

[0150] These and other embodiments are disclosed or are obvious from and encompassed by, the following Detailed Description.

### BRIEF DESCRIPTION OF THE DRAWINGS

[0151] The following detailed description, given by way of example, but not intended to limit the invention solely to the specific embodiments described, may be best understood in conjunction with the accompanying drawings, in which:

[0152] FIG. 1 is a schematic representation of IgY production;

[0153] FIG. 2 shows a putative mode of action of IgY-mediated protection against “bacterial species” associated diarrhea;

[0154] FIG. 3 is a partial section, taken in a horizontal plane, through a coated tooth, showing the irregular tooth surface, the conformation of the coating to the tooth surface and its relative thickness, all on a much enlarged scale. The hydrophobic barrier film, containing antimicrobial IgY and other functional agents, conforms to the substrate and fills pits, fissures, cracks and other irregularities of the tooth surface. The transfer layer facilitates adhesion of the hydrophobic barrier film to the tooth surface;

[0155] FIGS. 4A and 4B are enlarged views of the coated tooth surface, showing the area of the tooth surface in FIG. 3, to demonstrate the electrostatic charge distribution at the interface between the tooth surface and the transfer agent. These figures illustrate the mode of attachment of the transfer agent to the negatively charged tooth surface. (A) The molecules of the positively charged surfactant form a dense monolayer which attaches to the negatively charged substrate. The alkyl groups of the transfer agent face away from the surface. (B) Polyamine molecules adsorb to the substrate with their hydrophobic side groups facing away from the hydrophilic tooth surface;

[0156] FIG. 5A shows the structure of gingipain precursor polypeptides RgpB, RgpA, Kgp and HagA;

[0157] FIG. 5B shows the processed RgpA, Kgp and HagA polyproteins.

### DETAILED DESCRIPTION

[0158] It is noted that in this disclosure and particularly in the claims and/or paragraphs, terms such as “comprises”, “comprised”, “comprising” and the like can have the meaning attributed to it in U.S. Patent law; e.g., they can mean “includes”, “included”, “including”, and the like; and that terms such as “consisting essentially of” and “consists essentially of” have the meaning ascribed to them in U.S. Patent law, e.g., they allow for elements not explicitly recited, but exclude elements that are found in the prior art or that affect a basic or novel characteristic of the invention.

[0159] Unless otherwise explained, all technical and scientific terms used herein have the same meaning as commonly understood by one of ordinary skill in the art to which this disclosure belongs. The singular terms “a”, “an”, and “the” include plural referents unless context clearly indicates otherwise. Similarly, the word “or” is intended to include “and” unless the context clearly indicates otherwise.

[0160] The term “about,” as used herein, means approximately, in the region of, roughly, or around. When the term “about” is used in conjunction with a numerical range, it modifies that range by extending the boundaries above and below the numerical values set forth. In general, the term “about” is used herein to modify a numerical value above and below the stated value by a variance of 10%. In one aspect, the term “about” means plus or minus 20% of the numerical value of the number with which it is being used. Therefore, about 50% means in the range of 45%-55%. Numerical ranges recited herein by endpoints include all numbers and fractions subsumed within that range (e.g. 1 to 5 includes 1, 1.5, 2, 2.75, 3, 3.90, 4, and 5). It is also to be understood that all numbers and fractions thereof are presumed to be modified by the term “about.”

[0161] By “animal” is intended mammals, human, birds, and the like. The animal may be selected from equine (e.g., horse), canine (e.g., dogs, wolves, foxes, coyotes, jackals), feline (e.g., lions, tigers, domestic cats, wild cats, other big cats, and other feline including cheetahs and lynx), ovine (e.g., sheep), bovine (e.g., cattle, cow, buffalo), swine (pig), avian (e.g., chicken, duck, goose, turkey, quail, pheasant, parrot, finches, hawk, crow, ostrich, emu and cassowary), primate (e.g., prosimian, tarsier, monkey, gibbon, ape), and fish. The term “animal” also includes an individual animal in all stages of development, including embryonic and fetal stages.

[0162] As used herein, the term “antigen” or “immunogen” means a substance that induces a specific immune response in a host animal. The antigen may comprise a whole organism, killed, attenuated or live; a subunit or portion of an organism; a recombinant vector containing an insert expressing an epitope, polypeptide, peptide, protein, or fragment thereof with immunogenic properties; a piece or fragment of nucleic acid capable of inducing an immune response upon presentation to a host animal; a protein, a polypeptide, a peptide, an epitope, a hapten, or any combination thereof. Alternately, the immunogen or antigen may comprise a toxin or antitoxin.

[0163] The term “immunogenic protein or peptide” as used herein also includes peptides and polypeptides that are immunologically active in the sense that once administered to the host, it is able to evoke an immune response of the humoral and/or cellular type directed against the protein. Preferably the protein fragment is such that it has substantially the same immunological activity as the total protein. Thus, a protein fragment according to the invention comprises or consists essentially of or consists of at least one epitope or antigenic determinant. The term epitope, also known as antigenic determinant, is the part of a macromolecule recognized by the immune system and able to induce an immune reaction of the humoral type (B cells) and/or cellular type (T cells).

[0164] The term “immunogenic protein or peptide” further contemplates deletions, additions and substitutions to the sequence, so long as the polypeptide functions to produce an immunological response as defined herein. In this regard, particularly preferred substitutions will generally be conservative in nature, i.e., those substitutions that take place within a family of amino acids. For example, amino acids are generally divided into four families: (1) acidic—aspartate and glutamate; (2) basic—lysine, arginine, histidine; (3) non-polar—alanine, valine, leucine, isoleucine, proline, phenylalanine, methionine, tryptophan; and (4) uncharged polar—glycine, asparagine, glutamine, cysteine, serine threonine, and tyrosine. Phenylalanine, tryptophan, and tyrosine are sometimes classified as aromatic amino acids. It is reasonably predictable that an isolated replacement of leucine with isoleucine or valine, or vice versa; an aspartate with a glutamate or vice versa; a threonine with a serine or vice versa; or a similar conservative replacement of an amino acid with a structurally related amino acid, will not have a major effect on the biological activity. Proteins having substantially the same amino acid sequence as the reference molecule but possessing minor amino acid substitutions that do not substantially affect the immunogenicity of the protein are, therefore, within the definition of the reference polypeptide.

[0165] The term epitope is the part of a macromolecule recognized by the immune system and able to induce an immune reaction of the humoral type (B cells) and/or cellular type (T cells). The term is also used interchangeably with “antigenic determinant” or “antigenic determinant site”. Antibodies that recognize the same epitope can be identified in a simple immunoassay showing the ability of one antibody to block the binding of another antibody to a target antigen.

[0166] An “immunological response” to a composition or vaccine is the development in the host of a cellular and/or antibody-mediated immune response to a composition or vaccine of interest. Usually, an “immunological response” includes but is not limited to one or more of the following effects: the production of antibodies, B cells, helper T cells, and/or cytotoxic T cells, directed specifically to an antigen or antigens included in the composition or vaccine of interest. Preferably, the host will display either a therapeutic or protective immunological response such that resistance to new infection will be enhanced and/or the clinical severity of the disease reduced. Such protection will be demonstrated by either a reduction or lack of symptoms normally displayed by an infected host, a quicker recovery time and/or a lowered viral titer in the infected host.

[0167] The term “immunogenic” protein or polypeptide as used herein also refers to an amino acid sequence which elicits an immunological response as described above. An “immunogenic” protein or polypeptide, as used herein, includes the full-length sequence of the protein, analogs thereof, or immunogenic fragments thereof. By “immunogenic fragment” is meant a fragment of a protein which includes one or more epitopes and thus elicits the immunological response described above. Such fragments can be identified using any number of epitope mapping techniques, well known in the art. See, e.g., Epitope Mapping Protocols in Methods in Molecular Biology, Vol. 66 (Glenn E. Morris, Ed., 1996). For example, linear epitopes may be determined by e.g., concurrently synthesizing large numbers of peptides on solid supports, the peptides corresponding to portions of the protein molecule, and reacting the peptides with antibodies while the peptides are still attached to the supports. Such techniques are known in the art and described in, e.g., U.S. Pat. No. 4,708,871; Geysen et al., 1984; Geysen et al., 1986. Similarly, conformational epitopes are readily identified by determining spatial conformation of amino acids such as by, e.g., x-ray crystallography and 2-dimensional nuclear magnetic resonance. See, e.g., Epitope Mapping Protocols, supra.

[0168] Synthetic antigens are also included within the definition, for example, polyepitopes, flanking epitopes, and other recombinant or synthetically derived antigens. Immunogenic fragments, for purposes of the present invention, will usually include at least about 3 amino acids, about 5 amino acids, about 10-15 amino acids, about 15-25 amino acids or more amino acids, of the molecule. There is no critical upper limit to the length of the fragment, which could comprise nearly the full-length of the protein sequence, or even a fusion protein comprising at least one epitope of the protein.

[0169] Accordingly, a minimum structure of a polynucleotide expressing an epitope is that it comprises or consists essentially of or consists of nucleotides to encode an epitope or antigenic determinant of protein or polypeptide from or derived from a microorganism that causes dental or oral health disease. A polynucleotide encoding a fragment of the total protein or polypeptide comprises or consists essentially of or consists of a minimum of 15 nucleotides, advantageously about 30-45 nucleotides, and preferably about 45-75, at least 57, 87 or 150 consecutive or contiguous nucleotides of the sequence encoding the total protein or polypeptide. Epitope determination procedures, such as, generating overlapping peptide libraries (Hemmer et al., 1998), Pepscan (Geysen et al., 1984; Geysen et al., 1985; Van der Zee R. et al., 1989; Geysen, 1990; Multipin® Peptide Synthesis Kits de Chiron) and algorithms (De Groot et al., 1999), can be used in the practice of the invention, without undue experimentation.

[0170] A “polynucleotide” is a polymeric form of nucleotides of any length that contains deoxyribonucleotides, ribonucleotides, and analogs in any combination. Polynucleotides may have three-dimensional structure, and may perform any function, known or unknown. The term “polynucleotide” includes double-, single-, and triple-stranded helical molecules. Unless otherwise specified or required, any embodiment of the invention described herein that is a polynucleotide encompasses both the double stranded form and each of two complementary forms known or predicted to make up the double stranded form of either the DNA, RNA or hybrid molecule.

[0171] The term “codon optimization” refers to the process of optimally configuring the nucleic acid sequence encoding a protein, polypeptide, antigen, epitope, domain or fragment for expression/translation in a selected host. In general, gene expression levels depend on many factors, such as promoter sequences and regulatory elements. One of the most important factors is the adaptation of the codon usage of the transcript gene to the typical codon usage of the host (Lithwich, G. and Margalit, H., Genome Res. 13, 2665-2673, 2003). Therefore, highly expressed genes in prokaryotic genomes under translational selection have a pronounced codon usage bias. This is because they use a small subset of codons that are recognized by the most abundant tRNA species (Ikemura, T., J. Mol. Biol. 151, 389-409, 1981). The force that modulates this codon adaptation is called translational selection and its strength is important in fast-growing bacteria (Rocha, E. P., Genome Res. 14, 2279-2286, 2004; Sharp, P. M. et al., Nucleic Acids Res. 33, 1141-1153). If a gene contains codons that are rarely used by the host, its expression level will not be maximal. This may be one of the limitations of heterologous protein expression (Gustafsson, C. et al., Trends Biotechnol. 22, 346-353, 2004) and the development of DNA vaccines (Ivory, C. and Chadee, K., Genet. Vaccines Ther. 2, 17, 2004). A high number of synthetic genes have been re-designed to increase their expression level. The Synthetic Gene Database (SGDB) (Wu, G. et al., Nucleic Acids Res. 35, D76-D79, 2007) contains information from more than 200 published experiments on synthetic genes. In the design process of a nucleic acid sequence that will be inserted into a new host to express a certain protein in optimal amounts, codon usage optimization is usually one of the first steps (Gustafsson, C., Trends Biotechnol. 22, 346-353, 2004). Codon usage optimization basically involves altering the rare codons in the target gene so that they more closely reflect the codon usage of the host without modifying the amino acid sequence of the encoded protein (Gustafsson, C., Trends Biotechnol. 22, 346-353, 2004). The information usually used for the optimization process is therefore the DNA or protein sequence to be optimized and a codon usage table (reference set) of the host.

[0172] The following are non-limiting examples of polynucleotides: a gene or gene fragment, exons, introns, mRNA, tRNA, rRNA, siRNA, ribozymes, cDNA, recombinant polynucleotides, branched polynucleotides, plasmids, vectors, isolated DNA of any sequence, isolated RNA of any sequence, nucleic acid probes and primers. A polynucleotide may comprise modified nucleotides, such as methylated nucleotides and nucleotide analogs, uracil, other sugars and linking groups such as fluororibose and thiolate, and nucleotide branches. The sequence of nucleotides may be further modified after polymerization, such as by conjugation, with a labeling component. Other types of modifications included in this definition are caps, substitution of one or more of the naturally occurring nucleotides with an analog, and introduction of means for attaching the polynucleotide to proteins, metal ions, labeling components, other polynucleotides or solid support. The polynucleotides can be obtained by chemical synthesis or derived from a microorganism.

[0173] The term “gene” is used broadly to refer to any segment of polynucleotide associated with a biological function. Thus, genes include introns and exons as in genomic sequence, or just the coding sequences as in cDNAs and/or the regulatory sequences required for their expression. For example, gene also refers to a nucleic acid fragment that expresses mRNA or functional RNA, or encodes a specific protein, and which includes regulatory sequences.

[0174] The invention further comprises a complementary strand to a polynucleotide encoding a herpesvirus protein, antigen, epitope or immunogen. The complementary strand can be polymeric and of any length, and can contain deoxyribonucleotides, ribonucleotides, and analogs in any combination thereof

[0175] The terms “protein”, “peptide”, “polypeptide” and “polypeptide fragment” are used interchangeably herein to refer to polymers of amino acid residues of any length. The polymer can be linear or branched, it may comprise modified amino acids or amino acid analogs, and it may be interrupted by chemical moieties other than amino acids. The terms also encompass an amino acid polymer that has been modified naturally or by intervention; for example disulfide bond formation, glycosylation, lipidation, acetylation, phosphorylation, or any other manipulation or modification, such as conjugation with a labeling or bioactive component.

[0176] An “isolated” polynucleotide or polypeptide is one that is substantially free of the materials with which it is associated in its native environment. By substantially free, is meant at least 50%, at least 70%, at least 80%, at least 90%, or at least 95% free of these materials.

[0177] Hybridization reactions can be performed under conditions of different stringency. Conditions that increase stringency of a hybridization reaction are well known. See for example, “Molecular Cloning: A Laboratory Manual”, second edition (Sambrook et al., 1989). Examples of relevant conditions include (in order of increasing stringency): incubation temperatures of 25° C., 37° C., 50° C., and 68° C.; buffer concentrations of 10×SSC, 6×SSC, 1×SSC, 0.1×SSC (where SSC is 0.15 M NaCl and 15 mM citrate buffer) and their equivalent using other buffer systems; formamide concentrations of 0%, 25%, 50%, and 75%; incubation times from 5 minutes to 24 hours; 1, 2 or more washing steps; wash incubation times of 1, 2, or 15 minutes; and wash solutions of 6×SSC, 1×SSC, 0.1×SSC, or deionized water.

[0178] The invention further encompasses polynucleotides encoding functionally equivalent variants and derivatives of the oral health compromising (OHC) polypeptides and functionally equivalent fragments thereof that may enhance, decrease or not significantly affect inherent properties of the polypeptides encoded thereby. These functionally equivalent variants, derivatives, and fragments display the ability to retain the activity. For instance, changes in a DNA sequence that do not change the encoded amino acid sequence, as well as those that result in conservative substitutions of amino acid residues, one or a few amino acid deletions or additions, and substitution of amino acid residues by amino acid analogs are those which will not significantly affect properties of the encoded polypeptide.

[0179] In one embodiment, the variants have at least 50%, at least 55%, at least 60%, at least 65%, at least 70%, at least 75%, at least 80%, at least 85%, at least 86%, at least 87%, at least 88%, at least 89%, at least 90%, at least 91%, at least 92%, at least 93%, at least 94%, at least 95%, at least 96%, at least 97%, at least 98% or at least 99% homology or identity to the OHC polynucleotide or polypeptide of interest.

### EXAMPLES

[0180] The invention is further described by the following non-limiting examples which further illustrate the invention, and are not intended, nor should they be interpreted to, limit the scope of the invention.

[0181] Soft chews containing the Antimicrobial IgY antibody alone and in combination with a macrocyclic lactone were prepared with a variety of non-active excipients and evaluated for effectiveness to control endoparasites and ectoparasites in cats and dogs. In addition, soft chewable compositions comprising one or more parasiticides that are active against endoparasites were prepared and evaluated for efficacy against various internal parasites.

### Example 1

### Preparation of Soft Chewable Veterinary Formulations

[0182] The soft chewable formulation of Table 1 was prepared by the following procedure: the active agent(s) and potassium sorbate (if present) were dissolved in the corresponding amount of solvent by mixing at ambient temperature. In a blender, the filler (e.g. soy protein fines and/or starch) are mixed together at ambient temperature until blended, then the other non-active components and the pre-made solution of the active agent(s) and potassium sorbate (if present) are added to the mixture. The mixture is stirred further until a well-blended dough-type mixture is formed.

[0183] The dough-like mixture is then formed into individual soft chewable dosage units in nominal sizes of 0.5 g, 1 g and 4 g. The formulations in Tables 2-24 may be prepared by similar procedures. In the tables below, the abbreviation “QS” meaning “quantum sufficit” is intended to mean that the amount of corresponding component may be adjusted to bring the composition to 100% (w/w).

TABLE 1

| Ingredients | Function | % (w/w) |
|---|---|---|
| Antimicrobial IgY Antibody | Active | 2.2 |
| Soy Protein Fines | Filler | 26.5 (QS) |
| Corn Starch | Filler | 31.0 |
| artificial meat flavor | Flavoring | 5.1 |
| artificial beef flavor | Flavoring | 7.1 |
| Povidone K-30 | Binder | 2.8 |
| PEG 400 | Solvent | 7.1 |
| PEG 4000 | Binder | 6.4 |
| polyethylene glycol 12-hydroxystearate | Surfactant | 3.0 |
| Glycerin | Humectant | 5.1 |
| Potassium Sorbate | Preservative | 0.3 |
| Caprylic/capric triglyceride | Solvent/Lubricant | 3.2 |

TABLE 2

| Ingredients | Function | % (w/w) |
|---|---|---|
| Antimicrobial IgY Antibody | Active | 2.2 |
| Soy Protein Fines | Filler | 56.0 (QS) |
| artificial meat flavor | Flavoring | 5.5 |
| artificial beef flavor | Flavoring | 7.5 |
| Povidone K-30 | Binder | 2.8 |
| PEG 4000 | Binder | 6.4 |
| Sorbitan monooleate | Surfactant | 4.0 |
| Glycerin | Humectant | 5.1 |
| Potassium Sorbate | Preservative | 0.3 |
| Propylene glycol dicaprylate/dicaprate | Solvent/Lubricant | 3.2 |
| Propylene glycol | Solvent | 7.0 |

TABLE 3

| Ingredients | Function | % (w/w) |
|---|---|---|
| Antimicrobial IgY Antibody | Active | 2.2 |
| Soy Protein Fines | Filler | 31 (QS) |
| Corn Gluten Meal | Filler | 30.0 |
| artificial beef flavor | Flavoring | 12.0 |
| Povidone K-30 | Binder | 2.8 |
| PEG 4000 | Binder | 6.4 |
| Polyoxyl 60 hydrogenated castor oil | Surfactant | 4.0 |
| Potassium Sorbate | Preservative | 0.3 |
| Propylene glycol dicaprylate/dicaprate | Solvent/Lubricant | 3.2 |
| PEG 400 | Solvent | 8.0 |

TABLE 4

| Ingredients | Function | % (w/w) |
|---|---|---|
| Antimicrobial IgY Antibody | Active | 2.2 |
| Soy Protein Fines | Filler | 32.0 (QS) |
| Pre-gelatinized Corn Starch | Filler | 31.0 |
| artificial beef flavor | Flavoring | 12.0 |
| Povidone K-30 | Binder | 2.8 |
| PEG 4000 | Binder | 6.4 |
| polyoxyl 35 castor oil | Surfactant | 4.0 |
| Potassium Sorbate | Preservative | 0.3 |
| Propylene glycol dicaprylate/dicaprate | Solvent/Lubricant | 3.2 |
| PEG 400 | Solvent | 6.0 |

TABLE 5

| Ingredients | Function | % (w/w) |
|---|---|---|
| Antimicrobial IgY Antibody | Active | 2.2 |
| Soy Protein Fines | Filler | 26.0 (QS) |
| Pre-gelatinized Corn Starch | Filler | 30.0 |
| beef flavor | Flavoring | 15.0 |
| Copovidone | Binder | 3.3 |
| PEG 4000 | Binder | 5.5 |
| Polyoxyl 60 hydrogenated castor oil | Surfactant | 4.0 |
| Glycerin | Humectant | 5.1 |
| Potassium Sorbate | Preservative | 0.3 |
| Propylene glycol dicaprylate/dicaprate | Solvent/Lubricant | 3.2 |
| PEG 400 | Solvent | 5.4 |

TABLE 6

| Ingredients | Function | % (w/w) |
|---|---|---|
| Antimicrobial IgY Antibody | Active | 1.5 |
| Soy Protein Fines | Filler | 46.5 (QS) |
| beef flavor | Flavoring | 20.0 |
| Povidone K-30 | Binder | 7.0 |
| PEG 400 | Solvent | 15 |
| polyethylene glycol 12-hydroxystearate | Surfactant | 3.0 |
| Caprylic/capric triglyceride | Solvent/lubricant | 7.0 |

TABLE 7

| Ingredients | Function | % (w/w) |
|---|---|---|
| Antimicrobial IgY Antibody | Active | 1.875 |
| Soy Protein Fines | Filler | 46.1 (QS) |
| beef flavor | Flavoring | 20.0 |
| Povidone K-30 | Binder | 8.5 |
| PEG 400 | Solvent | 15.5 |
| polyethylene glycol 12-hydroxystearate | Surfactant | 3.0 |
| Caprylic/capric triglyceride | Solvent/lubricant | 5.0 |

TABLE 8

| Ingredients | Function | % (w/w) |
|---|---|---|
| Antimicrobial IgY Antibody | Active | 1.875 |
| Soy Protein Fines | Filler | 36.1 (QS) |
| beef flavor | Flavoring | 20.0 |
| Povidone K-30 | Binder | 8.5 |
| PEG 400 | Solvent | 15.5 |
| polyethylene glycol 12-hydroxystearate | Surfactant | 3.0 |
| Caprylic/capric triglyceride | Solvent/lubricant | 5.0 |
| Croscarmellose sodium | disintegrant | 10.0 |

TABLE 9

| Ingredients | Function | % (w/w) |
|---|---|---|
| Antimicrobial IgY Antibody | Active | 2.3 |
| Soy Protein Fines | Filler | 20.6 (QS) |
| Corn Starch | Filler | 25.0 |
| beef flavor | Flavoring | 20.5 |
| Povidone K-30 | Binder | 2.8 |
| PEG 400 | Solvent | 7.2 |
| PEG 4000 | Binder | 6.4 |
| polyethylene glycol 12-hydroxystearate | Surfactant | 3.1 |
| Glycerin | Humectant | 8.6 |
| Potassium Sorbate | Preservative | 0.3 |
| Caprylic/capric triglyceride | Solvent/Lubricant | 3.1 |

TABLE 10

| Ingredients | Function | % (w/w) |
|---|---|---|
| Antimicrobial IgY Antibody | Active | 2.3 |
| Soy Protein Fines | Filler | 20.0 (QS) |
| Corn Starch | Filler | 25.0 |
| beef flavor | Flavoring | 20.0 |
| Povidone K-30 | Binder | 2.8 |
| PEG 400 | Solvent | 7.1 |
| PEG 4000 | Binder | 6.4 |
| polyethylene glycol 12-hydroxystearate | Surfactant | 3.1 |
| Glycerin | Humectant | 10.0 |
| Potassium Sorbate | Preservative | 0.3 |
| Caprylic/capric triglyceride | Solvent/Lubricant | 3.2 |

TABLE 11

| Ingredients | Function | % (w/w) |
|---|---|---|
| Antimicrobial IgY Antibody | Active | 1.89 |
| Milbemycin oxime | Active | 0.375 |
| Soy Protein Fines | Filler | 20.0 (QS) |
| Corn Starch | Filler | 24.7 |
| beef flavor | Flavoring | 20.2 |
| Povidone K-30 | Binder | 2.7 |
| PEG 400 | Solvent | 7.1 |
| PEG 4000 | Binder | 6.3 |
| polyethylene glycol 12-hydroxystearate | Surfactant | 3.0 |
| Glycerin | Humectant | 10.1 |
| Caprylic/capric triglyceride | Solvent/Lubricant | 3.1 |
| Potassium Sorbate | Preservative | 0.3 |
| BHT | Antioxidant | 0.14 |

TABLE 12

| Ingredients | Function | % (w/w) |
|---|---|---|
| Antimicrobial IgY Antibody | Active | 1.875 |
| Milbemycin oxime | Active | 0.375 |
| Soy Protein Fines | Filler | 19.4 (QS) |
| Corn Starch | Filler | 25.0 |
| beef flavor | Flavoring | 20.0 |
| Povidone K-30 | Binder | 2.75 |
| PEG 400 | Solvent | 7.1 |
| PEG 4000 | Binder | 6.35 |
| polyethylene glycol 12-hydroxystearate | Surfactant | 3.1 |
| Glycerin | Humectant | 10.0 |
| Caprylic/capric triglyceride | Solvent/Lubricant | 3.15 |
| Potassium Sorbate | Preservative | 0.3 |
| BHT | Antioxidant | 0.14 |
| Citric Acid Monohydrate | pH modifier | 0.50 |

TABLE 13

| Ingredients | Function | % (w/w) |
|---|---|---|
| Antimicrobial IgY Antibody | Active | 1.875 |
| Milbemycin oxime | Active | 0.375 |
| Soy Protein Fines | Filler | 20.5 (QS) |
| Corn Starch | Filler | 24.0 |
| beef flavor | Flavoring | 20.0 |
| Copovidone | Binder | 2.75 |
| PEG 300 | Solvent | 8.0 |
| PEG 4000 | Binder | 6.35 |
| Polyoxyl 60 hydrogenated castor oil | Surfactant | 3.1 |
| Glycerin | Humectant | 10.0 |
| Propylene glycol dicaprylate/dicaprate | Solvent/Lubricant | 2.15 |
| Potassium Sorbate | Preservative | 0.3 |
| BHT | Antioxidant | 0.14 |
| Citric Acid Monohydrate | pH modifier | 0.50 |

TABLE 14

| Ingredients | Function | % (w/w) |
|---|---|---|
| Antimicrobial IgY Antibody | Active | 1.875 |
| Ivermectin | Active | 0.375 |
| Soy Protein Fines | Filler | 29.4 (QS) |
| Pre-gelatinized corn starch | Filler | 15.0 |
| beef flavor | Flavoring | 20.0 |
| Copovidone | Binder | 2.75 |
| Caprylate/caprate glyceride | Solvent | 8.0 |
| PEG 4000 | Binder | 6.35 |
| polyoxyl 35 castor oil (Cremophor ® EL) | Surfactant | 3.1 |
| Propylene glycol | Humectant | 10.0 |
| Propylene glycol dicaprylate/dicaprate | Solvent/Lubricant | 2.2 |
| Potassium Sorbate | Preservative | 0.3 |
| BHT | Antioxidant | 0.14 |
| Citric Acid Monohydrate | pH modifier | 0.50 |

TABLE 15

| Ingredients | Function | % (w/w) |
|---|---|---|
| Antimicrobial IgY Antibody | Active | 2.2 |
| Moxidectin | Active | 0.50 |
| Soy Protein Fines | Filler | 29.4 (QS) |
| Pre-gelatinized corn starch | Filler | 15.0 |
| beef flavor | Flavoring | 20.0 |
| Povidone K30 | Binder | 2.75 |
| Caprylate/caprate glyceride | Solvent | 8.0 |
| PEG 4000 | Binder | 6.0 |
| Polyoxyl 40 hydrogenated castor oil | Surfactant | 3.1 |
| (Cremophor ® RH40) | | |
| Propylene glycol | Humectant/Solvent | 10.0 |
| Propylene glycol dicaprylate/dicaprate | Solvent/Lubricant | 2.2 |
| Potassium Sorbate | Preservative | 0.3 |
| BHT | Antioxidant | 0.14 |
| Citric Acid Monohydrate | pH modifier | 0.50 |

TABLE 16

| Ingredients | Function | % (w/w) |
|---|---|---|
| Antimicrobial IgY Antibody | Active | 0.5 |
| Soy Protein Fines | Filler | 16.6 |
| Corn Starch | Filler | 32.5 (QS) |
| beef flavor | Flavoring | 19.4 |
| Povidone K-30 | Binder | 2.6 |
| PEG 400 | Solvent | 7.8 |
| PEG 4000 | Binder | 6.1 |
| polyethylene glycol 12-hydroxystearate | Surfactant | 4.7 |
| Lauroyl polyoxyl-32 glycerides | Surfactant | 4.7 |
| Potassium Sorbate | Preservative | 0.3 |
| Caprylic/capric triglyceride | Solvent/Lubricant | 4.9 |

TABLE 17

| Ingredients | Function | % (w/w) |
|---|---|---|
| Antimicrobial IgY Antibody | Active | 0.5 |
| Soy Protein Fines | Filler | 19.4 |
| Pre-gelatinized corn Starch | Filler | 29.7 (QS) |
| beef flavor | Flavoring | 18.0 |
| Copovidone | Binder | 3.0 |
| PEG 540 | Solvent | 8.3 |
| PEG 4000 | Binder | 6.1 |
| Polyoxyl 60 hydrogenated castor oil | Surfactant | 5.1 |
| (Cremophor ® RH60) | | |
| Lauroyl polyoxyl-32 glycerides | Surfactant | 4.7 |
| Potassium Sorbate | Preservative | 0.3 |
| Caprylic/capric triglyceride | Solvent/Lubricant | 4.9 |

TABLE 18

| Ingredients | Function | % (w/w) |
|---|---|---|
| Antimicrobial IgY Antibody | Active | 0.5 |
| Soy Protein Fines | Filler | 26.9 (QS) |
| Corn Starch | Filler | 23.4 |
| beef flavor | Flavoring | 20.0 |
| PEG 400 | Solvent | 6.8 |
| PEG 4000 | Binder | 5.8 |
| polyethylene glycol 12-hydroxystearate | Surfactant | 4.8 |
| Lauroyl polyoxyl-32 glycerides | Surfactant | 6.3 |
| Potassium Sorbate | Preservative | 0.3 |
| Caprylic/capric triglyceride | Solvent/Lubricant | 5.2 |

TABLE 19

| Ingredients | Function | % (w/w) |
|---|---|---|
| Antimicrobial IgY Antibody | Active | 0.5 |
| Soy Protein Fines | Filler | 24.3 (QS) |
| Pre-gelatinized corn starch | Filler | 26.0 |
| beef flavor | Flavoring | 19.0 |
| PEG 540 | Solvent | 6.8 |
| Crospovidone | Binder | 5.8 |
| polyoxyl 35 castor oil (Cremophor ® EL) | Surfactant | 5.2 |
| Lauroyl polyoxyl-32 glycerides | Surfactant | 6.9 |
| Potassium Sorbate | Preservative | 0.3 |
| Caprylic/capric triglyceride | Solvent/Lubricant | 5.2 |

TABLE 20

| Ingredients | Function | % (w/w) |
|---|---|---|
| Antimicrobial IgY Antibody | Active | 0.5 |
| Soy Protein Fines | Filler | 41.6 (QS) |
| beef flavor | Flavoring | 19.9 |
| Povidone K-30 | Binder | 4.6 |
| PEG 400 | Solvent | 15.1 |
| PEG 4000 | Binder | 8.1 |
| polyethylene glycol 12-hydroxystearate | Surfactant | 4.6 |
| Potassium Sorbate | Preservative | 0.3 |
| Caprylic/capric triglyceride | Solvent/Lubricant | 4.6 |

TABLE 21

| Ingredients | Function | % (w/w) |
|---|---|---|
| Antimicrobial IgY Antibody | Active | 0.5 |
| Soy Protein Fines | Filler | 44.2 (QS) |
| beef flavor | Flavoring | 18.0 |
| Povidone K-30 | Binder | 4.6 |
| PEG 400 | Solvent | 15.1 |
| Cross-linked polyvinylpyrrolidone | Binder | 7.1 |
| propylene glycol monolaurate | Surfactant | 4.6 |
| Potassium Sorbate | Preservative | 0.3 |
| Caprylic/capric triglyceride | Solvent/Lubricant | 5.6 |

TABLE 22

| Ingredients | Function | % (w/w) |
|---|---|---|
| Antimicrobial IgY Antibody | Active | 0.5 |
| Corn Starch | Filler | 40.8 (QS) |
| beef flavor | Flavoring | 19.9 |
| Povidone K-30 | Binder | 5.7 |
| PEG 400 | Solvent | 11.4 |
| PEG 4000 | Binder | 5.7 |
| polyethylene glycol 12-hydroxystearate | Surfactant | 2.7 |
| Lauroyl polyoxyl-32 glycerides | Surfactant | 2.7 |
| Potassium Sorbate | Preservative | 0.3 |
| Caprylic/capric triglyceride | Solvent/Lubricant | 5.4 |
| Sodium Starch glycolate | Disintegrate | 5.0 |

TABLE 23

| Ingredients | Function | % (w/w) |
|---|---|---|
| Antimicrobial IgY Antibody | Active | 0.5 |
| Soy Protein Fines | Filler | 19.4 |
| Corn Starch | Filler | 24.0 (QS) |
| beef flavor | Flavoring | 19.2 |
| Povidone K-30 | Binder | 2.6 |
| PEG 400 | Solvent | 8.6 |
| PEG 4000 | Binder | 6.0 |
| polyethylene glycol 12-hydroxystearate | Surfactant | 4.6 |
| Lauroyl polyoxyl-32 glycerides | Surfactant | 4.6 |
| Potassium Sorbate | Preservative | 0.3 |
| Caprylic/capric triglyceride | Solvent/Lubricant | 5.3 |
| Glycerin | Humectant | 4.8 |

TABLE 24

| Ingredients | Function | % (w/w) |
|---|---|---|
| Antimicrobial IgY Antibody | Active | 2.3 |
| Soy Protein Fines | Filler | 22.0 (QS) |
| Corn Starch | Filler | 26.4 |
| beef flavor | Flavoring | 10.0 |
| Artificial Powdered Meat Flavor | Flavoring | 10.0 |
| Povidone K-30 | Binder | 2.7 |
| PEG 400 | Solvent | 7.0 |
| PEG 4000 | Binder | 6.25 |
| polyethylene glycol 12-hydroxystearate | Surfactant | 3.0 |
| Glycerin | Humectant | 7.0 |
| Potassium Sorbate | Preservative | 0.3 |
| Caprylic/capric triglyceride | Solvent/Lubricant | 3.0 |

TABLE 25

| Ingredients | Function | % (w/w) |
|---|---|---|
| Antimicrobial IgY Antibody | Active | 13.6 |
| Soy Protein Fines | Filler | 15-25 (QS) |
| Corn Starch | Filler | 15-25 |
| beef flavor | Flavoring | 20 |
| PEG 400 | Solvent | 11.9 |
| PEG 4000 | Binder | 5 |
| polyethylene glycol 12-hydroxystearate | Surfactant | 3-5 |
| Glycerin | Humectant | 2-5 |
| Potassium Sorbate | Preservative | 0.3 |

TABLE 26

| Ingredients | Function | % (w/w) |
|---|---|---|
| Antimicrobial IgY Antibody | Active | 13.6 |
| Corn Starch | Filler | 41 (QS) |
| beef flavor | Flavoring | 15-25 |
| PEG 400 | Solvent | 11.9 |
| Cross-linked polyvinylpyrrolidone | Binder | 5 |
| polyoxyl 35 castor oil | Surfactant | 3-5 |
| Propylene glycol | Humectant | 2-5 |
| Potassium Sorbate | Preservative | 0.3 |

TABLE 27

| Ingredients | Function | % (w/w) |
|---|---|---|
| Antimicrobial IgY Antibody | Active | 13.6 |
| Soy Protein Fines | Filler | 12.6 |
| Corn Starch | Filler | 25 (QS) |
| beef flavor | Flavoring | 20 |
| Povidone K-30 | Binder | 2.75 |
| PEG 400 | Solvent | 5.5 |
| PEG 4000 | Binder | 6.2 |
| polyethylene glycol 12-hydroxystearate | Surfactant | 5.0 |
| Glycerin | Humectant | 7-8 |
| Potassium Sorbate | Preservative | 0.3 |
| Caprylic/capric triglyceride | Solvent/Lubricant | 2.0 |

TABLE 28

| Ingredients | Function | % (w/w) |
|---|---|---|
| Antimicrobial IgY Antibody | Active | 13.6 |
| Soy protein fines | Filler | 25.0 (QS) |
| Corn Starch | Filler | 15-18 |
| beef flavor | Flavoring | 20 |
| PEG 400 | Solvent | 11.9 |
| Cross-linked polyvinylpyrrolidone | Binder | 5 |
| polyoxyl 35 castor oil | Surfactant | 3-5 |
| Propylene glycol | Humectant | 2-5 |
| Potassium Sorbate | Preservative | 0.3 |

TABLE 29

| Ingredients | Function | % (w/w) |
|---|---|---|
| Antimicrobial IgY Antibody | Active | 13.6 |
| Soy protein fines | Filler | 15.2 (QS) |
| Corn Starch | Filler | 25 |
| beef flavor | Flavoring | 20 |
| PEG 400 | Solvent | 11.9 |
| PEG 4000 | Binder | 5.0 |
| polyethylene glycol 12-hydroxystearate | Surfactant | 5.0 |
| Caprylic/capric triglyceride | Solvent/lubricant | 1.0 |
| Glycerin | Humectant | 3.0 |
| Potassium Sorbate | Preservative | 0.3 |

TABLE 30

| Ingredients | Function | % (w/w) |
|---|---|---|
| Antimicrobial IgY Antibody | Active | 13.6 |
| Soy protein fines | Filler | 19.2 (QS) |
| Corn Starch | Filler | 20 |
| beef flavor | Flavoring | 20 |
| PEG 400 | Solvent | 11.9 |
| PEG 4000 | Binder | 5.0 |
| polyethylene glycol 12-hydroxystearate | Surfactant | 5.0 |
| Caprylic/capric triglyceride | Solvent/lubricant | 1.0 |
| Glycerin | Humectant | 4.0 |
| Potassium Sorbate | Preservative | 0.3 |

TABLE 31

| Ingredients | Function | % (w/w) |
|---|---|---|
| Antimicrobial IgY Antibody | Active | 13.6 |
| Soy protein fines | Filler | 24.2 (QS) |
| Corn Starch | Filler | 15 |
| beef flavor | Flavoring | 20 |
| PEG 400 | Solvent | 11.9 |
| PEG 4000 | Binder | 5.0 |
| polyethylene glycol 12-hydroxystearate | Surfactant | 5.0 |
| Caprylic/capric triglyceride | Solvent/lubricant | 1.0 |
| Glycerin | Humectant | 4.0 |
| Potassium Sorbate | Preservative | 0.3 |

TABLE 32

| Ingredients | Function | % (w/w) |
|---|---|---|
| Antimicrobial IgY antibody | Active | 1.875 |
| Milbemycin oxime | Active | 0.375 |
| Corn starch | Filler | 20.0 |
| Soy protein fines | Filler | 28.3 (QS) |
| beef flavor | Flavoring | 25.0 |
| Povidone K-30 | Binder | 6.0 |
| PEG 400 | Solvent | 12.0 |
| polyethylene glycol 12-hydroxystearate | Surfactant | 3.0 |
| Caprylic/capric triglyceride | Solvent/lubricant | 3.0 |
| Potassium sorbate | Preservative | 0.3 |
| BHT | Antioxidant | 0.14 |

TABLE 33

| Ingredients | Function | % (w/w) |
|---|---|---|
| Moxidectin | Active | 0.03 |
| Milbemycin oxime | Active | 0.375 |
| Antimicrobial IgY antibody | Active | 1.875 |
| Soy protein fines | Filler | 23 (QS) |
| Starch | Filler | 21 |
| beef flavor | Flavoring | 20 |
| Povidone K-30 | Binder | 2.75 |
| PEG 400 | Solvent | 7.1 |
| polyethylene glycol 12-hydroxystearate | Surfactant | 3.1 |
| PEG 4000 | Binder | 6.35 |
| Caprylic/capric triglyceride | Solvent/lubricant | 3.15 |
| Glycerin | Humectant | 10.0 |
| Potassium sorbate | Preservative | 0.3 |
| BHT | Antioxidant | 0.14 |
| Citric acid | Preservative | 0.5 |

### Example 2

### Evaluation of the Effectiveness of IgY Antibodies on the Reduction of Plaque, Calculus, Gingivitis and Halitosis in Adult Dogs

[0184] The objective of this study is to evaluate the effectiveness of IgY antibodies on the reduction of dental plaque, calculus, gingivitis and halitosis in adult Beagle dogs.

[0185] Beagles are either given 25 mg (per application) of IgYa antibodies (Group 1), IgYb antibodies (Group 2), or gel formulation vehicle alone (Group 3; control).

[0186] Pre-Test Phase (Day −7 to Day 0): A pre-test phase of seven days is conducted before the initiation of the 31-day treatment period. During the pre-test phase, the dogs selected for this study are weighed and fed the control diet, Purina Dog Chow a kibble, fed dry only. Each animal will have its teeth scaled and polished upon initiation of the pre-test phase (Day −7). On Day 0, halitosis, plaque and gingivitis are evaluated. The scores obtained are indicative of the rate of plaque buildup for each animal when being fed the control diet only. Animals are stratified into 4 groups based on plaque scores. This procedure is performed in an attempt to reduce the variability of scores during the test/treatment phase. Following the dental scoring on Day 0, each animal will undergo a dental cleaning and polishing procedure. After this procedure a disclosing agent of 2% Eosin is applied to all test teeth and an oral examination is performed to ensure there is no remaining plaque or calculus buildup and a clean mouth is used for the start of the study.

[0187] Test Phase (Day 0 to Day 31): On Days 0-31 all dogs are fed control diet only. Dogs assigned to Group 1 are treated with test article IgYa based gel, dogs assigned to Group 2 are treated with test article IgYb based gel and dogs assigned to Group 3 are treated with the control article plain gel every other day, beginning on Day 1. The gel is applied along the gingival margin on the upper and lower jaw. Dogs assigned to Group 4 are fed a control diet and will not be treated. On Day 31, each animal will undergo halitosis, gingivitis and calculus evaluations by one technician, and a plaque evaluation by a second technician.

[0188] The dates for the initiation of the pre-test phase and the test phase are staggered due to the time required for teeth scaling and polishing. Start dates are consistent for the number of animals between the groups, and each animal will have a 7-day pre-test phase followed by a 31-day test phase.

TABLE 34
Study activities

| Day | Activity |
|---|---|
| −8 | Body weights |
| −7 | Cleaning/polishing teeth |
| −1 | Body weights |
| 0 | Dental Evaluation followed by cleaning/polishing |
| 1 | Oral treatment (Groups 1, 2 and 3) |
| 3 | Oral treatment (Groups 1, 2 and 3) |
| 5 | Oral treatment (Groups 1, 2 and 3) |
| 6 | Body weights |
| 7 | Oral treatment (Groups 1, 2 and 3) |
| 9 | Oral treatment (Groups 1, 2 and 3) |
| 11 | Oral treatment (Groups 1, 2 and 3) |
| 13 | Oral treatment (Groups 1, 2 and 3) |
| | Body weights |
| 15 | Oral treatment (Groups 1, 2 and 3) |
| 17 | Oral treatment (Groups 1, 2 and 3) |
| 19 | Oral treatment (Groups 1, 2 and 3) |
| 20 | Body weights |
| 21 | Oral treatment (Groups 1, 2 and 3) |
| 23 | Oral treatment (Groups 1, 2 and 3) |
| 25 | Oral treatment (Groups 1, 2 and 3) |
| 27 | Oral treatment (Groups 1, 2 and 3) |
| | Body weights |
| 29 | Oral treatment (Groups 1, 2 and 3) |
| 31 | Dental Evaluation |

[0189] Description Purpose-bred Beagle dogs. Number. A minimum of 40 animals one year of age or older are used. Dogs are split into four groups of ten. The groups will generally be determined by stratifying the animals according to their plaque scores from Day 0 and assigning animals with similar plaque scores to each of the study groups. This method is used in an attempt to reduce the variability among the study groups. An equal number of dogs is assigned to each of the study groups.

[0190] Criteria for Animals Used. Healthy adult Beagle dogs meeting the above description are eligible for the study. Before study initiation, the dogs will undergo an oral cavity examination for normal occlusion and the presence of all test teeth. The initial oral examination will include a visual check for the presence of a significant furcation defect (loss of bone between the roots of multi-rooted teeth). Dogs with any complete furcation defect (i.e. a periodontal probe can be passed from the buccal surface and seen to emerge on the palatal/lingual surface) in any of required test teeth will not be included in this study.

[0191] Acclimation of Test Animals. Dogs are housed as intended for this study prior to study initiation.

[0192] Methods. Weights. Individual body weights are measured and recorded weekly throughout the study (Days −8, −1, 6, 13, 20 and 27).

[0193] Control Diet Fed During the Study (Day −7 to Day 31). Throughout the study, Purina Dog Chow, a kibble, fed dry, are supplied to each animal once daily for a minimum of 1 hour. Dogs are fed according to ideal body condition. Food consumption is recorded.

[0194] Application of the Test and control article. Dogs assigned to group 1, 2 and 3 are administered the appropriate treatment every other day throughout the course of the study (15 total treatments). The test article is applied approximately 2 hours after the control diet has been removed. Test articles and control article are applied along the top and bottom gingival line on both sides of the mouth.

TABLE 35
Study design

| | DOGS | | | |
|---|---|---|---|---|
| | PER | | | |
| GROUP | GROUP | TEST/GROUP | ROUTE/DOSE | FREQUENCY |
| 1 | 10 | IgYa based gel | Oral application | Every other |
| | | | 25 mg of IgY | day for 30 days |
| 2 | 10 | IgYb based gel | Oral application | (total 15 |
| | | | 25 mg of IgY | treatments) |
| 3 | 10 | Plain gel* | Oral application | |
| | | | plain gel | |
| 4 | 10 | — | — | — |

** A preparation of CARBIGEN M (CARBOPOL 947) at an optimal viscosity will be used as the vehicle (gel) for mixture with the IgY. All treatments will be prepared, dog side, prior to administration.
IgYa - purified anti-chimeric gingipain IgY Approximately 4.6 g of antibody were produced from 56 eggs. Frozen suspension of at a concentration of 370 ml at 12.6 mg/ml.
IgYb - purified Muno-Igy - no immunization (i.e. native IgY produced by the hens)

[0195] Dental Procedures. Pre-Test Phase. Each animal has its teeth scaled and polished on Day −7. On Day 0 each animal has halitosis, plaque and gingivitis evaluated which is followed by another dental cleaning and polishing. Halitosis, plaque and gingivitis assessments and dental cleanings/polishing are performed using general anesthesia. After the cleaning procedure a disclosing agent of 2% Eosin is applied to all test teeth and an oral examination is performed to ensure there is no remaining plaque or calculus buildup and a clean mouth is used for the start of the study. Test Phase. On Day 31, evaluation of gingivitis, calculus, plaque and halitosis are performed on each animal. Dental evaluations are performed under general anesthesia. Halitosis and gingivitis are evaluated first, and then calculus accumulation is scored prior to applying the disclosing agent for plaque evaluation. The examination of teeth will include the buccal surfaces and both sides of the mouth. Review is limited to these nine teeth: upper jaw—incisor 3 (13), canine (C), premolar 3 (P3), premolar 4 (P4) and molar 1 (M1); lower jaw—canine (C), premolar 3 (P3), premolar 4 (P4), molar 1 (M1).² Qualified dental scorers will not be involved in any study-related activities apart from dental scoring. Additionally, animals are selected in random order on Day 31, so that the scorers are unaware of each animal's treatment when scoring the teeth. Dental Observations. The presence of inflammation, ulceration or laceration anywhere in the oral cavity is recorded for each dog during dental scoring on Days 0 and 30.

[0196] Clinical Observations/Measurements.

[0197] Physical Examinations. Each dog is evaluated as to general health including oral health, body and hair coat condition and comments are recorded. Two milliliters of blood is taken from each dog to test for BUN, PCV, and TP prior to treatment initiation if these data have not been updated within the last 6 months.

[0198] Observations. Qualified personnel will perform clinical observations twice daily in accordance with standard procedures.

[0199] Dental Parameter Evaluation.

[0200] Halitosis. Oral malodor is evaluated using a halimeter. Readings are obtained by putting the straw end of the halimeter into the dog's mouth between the cheek and jaw. A pocket is made and the lips are closed around the straw to assure accurate readings. One reading is taken on each side of the mouth, and is recorded in ppb.

[0201] Gingivitis. Gingivitis, defined as the inflammation of the gums surrounding the teeth, is evaluated by the modified gingival index based on Lobene et al. (1986), which is herein incorporated by reference in its entirety. The MGI scoring system² is as set out in Table 36.

TABLE 36
MGI scoring system details
Gingivitis Scoring Method

| Score | Degree of Inflammation |
|---|---|
| 0 | Absence of inflammation |
| 1 | Mild inflammation; slight change in color, little change in texture |
| | of any portion of the marginal or papillary gingival unit |
| 2 | Mild inflammation; criteria as above but involving the entire |
| | marginal or papillary gingival unit |
| 3 | Moderate inflammation; glazing, redness, edema, and/or |
| | hypertrophy of the marginal or papillary gingival unit |
| 4 | Severe inflammation; marked redness, edema and/or hypertrophy |
| | of the marginal or papillary gingival unit, spontaneous |
| | bleeding, congestion, or ulceration |

[0202] Each tooth is assigned a numerical score based on the degree of inflammation. The sum of the teeth scores are divided by the number of teeth examined (18) to obtain a whole mouth mean gingivitis score for each animal.

[0203] Calculus. Calculus is defined as the calcium salts secreted in saliva that are deposited on the surface of the teeth as a hard substance that is resistant to removal by chewing or brushing. Calculus (tartar) is to be recorded after air-drying the tooth surface. Calculus is scored quantitatively using modifications of a method developed by Schiff. Each tooth is assigned a numerical score based on the percentage of calculus coverage (see calculus scoring method below). The sum of the teeth scores are divided by the number of teeth examined (18) to obtain a whole mouth mean calculus score for each animal.¹

TABLE 37
Calculus Scoring Method
Calculus Scoring Method

| Score | % of Calculus Coverage |
|---|---|
| 0 | No calculus detected |
| 1 | 1-24 |
| 2 | 25-49 |
| 3 | 50-74 |
| 4 | 75-100 |

[0204] Plaque. Plaque is defined as the soft, bacteria-rich layer that rapidly forms on the surface of the teeth. Plaque is evaluated using a modification of the Quigley and Hein (1962) (Turesky, 1970) plaque index. The extent of plaque and plaque thickness is determined by placing a disclosing agent on the teeth and rinsing the excess off with water. The whole tooth is scored: The teeth are visually halved by visualizing midway between the gingival margin and the tooth cusp. Each half is given a score for the percentage of coronal surface covered with plaque and thickness of plaque. The score for each half is calculated by multiplying the coverage and thickness scores. Gingival and occlusal scores are then added together for a whole tooth score. The sum of the tooth scores are divided by the number of teeth examined (18) to obtain a whole mouth mean plaque score for each animal.¹

TABLE 38
Plaque Scoring Method
Plaque Scoring Method

| Score | % of Plaque Coverage |
|---|---|
| 0 | No plaque detected |
| 1 | 1-24 |
| 2 | 25-49 |
| 3 | 50-74 |
| 4 | 75-100 |

| Score | Plaque Thickness | Disclosing Agent Color |
|---|---|---|
| 1 | Light | Pink to Light Red |
| 2 | Medium | Red |
| 3 | Heavy | Dark Red |

[0205] Variable(s) to be measured. Primary Parameter 1: The effects of the IgY antibodies on canine dental plaque, calculus, gingivitis and halitosis. Secondary Parameter 1. Food consumption (control diet); Secondary Parameter 2: Body weight changes; Secondary Parameter 3: Adverse reactions, daily observations.

[0206] Statistical Methodology. Individual t-tests, mean scores, standard error and standard deviation functions are performed on all dental parameters. Results obtained for treated groups are compared with the results obtained for Group 4 (untreated group). Means, standard errors and standard deviations will also be obtained for food consumption and body weights/weight changes.

### STUDY REFERENCES

[0207] ¹Logan E I, Boyce E N. Oral Health Assessment in Dogs: Parameters and Methods. J. Vet. Dent. 1994 August; 11(2): 58-63.
[0208] ²The Veterinary Oral Health Council, A System for Recognition of Effectiveness of Veterinary Dental Products: Protocol and Submissions, Haddonfield, N J, 2014.
[0209] ³Holmstrom, S. E., Frost, P. and Eisner, E. R. Veterinary Dental Techniques for the Small Animal Practitioner, 2^{nd} ed. W. B. Saunders, Philadelphia, Pa. 1998: p. 482.

[0210] Conclusion. Dogs treated with anti-chimeric gingipain IgY showed significant improvement across all oral health parameters, when compared to dogs treated with Muno-IgY (i.e. endogenous/native IgY from the yolks of un-immunized hens) or gel-only.

[0211] The invention will now be described in the following numbered paragraphs:

1. A composition for reducing or eliminating oral health compromising (OHC) microorganisms, comprising:
[0212] a. a safe and effective amount of an antimicrobial IgY antibody, produced in the egg of an avian animal;
[0213] b. a veterinarily or pharmaceutically acceptable vehicle or carrier; and
[0214] c. optionally comprising all the naturally-occurring components of said egg; and

[0215] wherein the IgY antibody was produced using, or raised against and reacts to, an immunogenic portion of any one or more of the polypeptide sequences as set forth in SEQ ID NOs: 110-113, 120, 123-125, 130-133, 135-138, 143-148, 221-224 or 227-349; or

[0216] wherein the IgY antibody was produced using, or raised against, a polypeptide comprising, consisting of or consisting essentially of one or more of the following: SEQ ID NO:221; residues 1-184 of SEQ ID NO:221; residues 1-290 of SEQ ID NO:221; residues 65-184 of SEQ ID NO:221; residues 65-290 of SEQ ID NO:221; residues 65-419 of SEQ ID NO:221; residues 192-290 of SEQ ID NO:221; residues 192-419 of SEQ ID NO:221; residues 147-419 of SEQ ID NO:221; SEQ ID NO:225; or SEQ ID NO:226; or

[0217] wherein the IgY antibody was produced using, or raised against, a polypeptide comprising, consisting of or consisting essentially of one or more of the following: residues 65-184 of SEQ ID NO:221; residues 65-290 of SEQ ID NO:221; or residues 192-290 of SEQ ID NO:221; or

[0218] wherein the IgY antibody was produced using, or raised against, a polypeptide comprising, consisting of or consisting essentially of one or more of the following: residues 65-184 of SEQ ID NO:221, residues 65-290 of SEQ ID NO:221 and residues 192-290 of SEQ ID NO:221; or

[0219] wherein the IgY antibody was produced using, or raised against, a polypeptide comprising, consisting of or consisting essentially of SEQ ID NO:222;

[0220] wherein the IgY antibody was produced using, or raised against, a polypeptide comprising, consisting of or consisting essentially of a sequence having greater than 60, 70, 80 or 90% identity to the sequence as set forth in SEQ ID NO:221, 222, 223 or 224.

2. The composition of paragraph 1, formulated as a soft chewable veterinary composition, wherein the carrier comprises one or more fillers, at least one flavoring agent, at least one binder, one or more solvents, one or more surfactants, at least one humectant, optionally an antioxidant, and optionally a preservative.
3. The composition of paragraph 2, wherein the one or more fillers is soy protein fines, corn starch, or a mixture thereof
4. The composition of paragraph 3, wherein the binder is polyvinylpyrrolidone or a polyethylene glycol, or a combination thereof.
5. The composition of paragraph 4, wherein the solvent is a liquid polyethylene glycol or a caprylic/capric triglyceride, or a combination thereof
6. The composition of paragraph 4, wherein the surfactant is polyethylene glycol hydroxystearate.
7. The composition of paragraph 4, wherein the humectant is glycerin.
8. The composition of paragraph 4, wherein the flavoring agent is an artificial meat or beef flavor.
9. The composition of paragraph 4, comprising:
[0221] a. a filler selected from corn starch, pre-gelatinized corn starch, corn gluten meal and soy protein fines, or a combination thereof
[0222] b. a solvent selected from liquid polyethylene glycols, propylene glycol, propylene carbonate, caprylic/capric triglycerides, caprylic/capric/linoleic triglycerides, caprylic/capric/succinic triglycerides, propylene glycol dicaprylate/dicaprate, glycerol caprylate/caprate and polyglycolized glycerides, or a combination thereof;
[0223] c. a binder selected from polyvinylpyrrolidone, polyethylene glycols, co-polymers of vinyl acetate and vinylpyrrolidone, potato starch and corn starch, or a combination thereof
[0224] d. a humectant selected from glycerol, propylene glycol, cetyl alcohol, glycerin monostearate and polyethylene glycols, or a combination thereof
[0225] e. a surfactant selected from glyceryl monooleate, polyoxyethylene sorbitan fatty acid esters, sorbitan esters, polyvinyl alcohol, polysorbates, sodium lauryl sulfate, co-polymers of ethylene oxide and propylene oxide, propylene glycol monolaurate, glycerol caprylate/caprate, polyglycolized glycerides and polyethylene glycol hydroxystearate, or a combination thereof and
[0226] f. a natural or artificial beef or meat flavor.
   10. The composition of paragraph 9, wherein the composition comprises IgY antibody at a concentration of about 1% to about 20% by weight.
   11. The composition of paragraph 10, wherein:
[0227] a. the filler is a combination of corn starch and soy protein fines and is present at a concentration of about 30% to about 50% (w/w);
[0228] b. the solvent is a mixture of liquid polyethylene glycol and caprylic/capric triglycerides and is present at a concentration of about 5% to about 20% (w/w);
[0229] c. the binder is polyethylene glycol or polyvinylpyrrolidone, or a combination thereof, and is present at a concentration of about 5% to about 15% (w/w);
[0230] d. the humectant is glycerin and is present at a concentration of about 5% to about 20%;
[0231] e. the surfactant is polyethylene glycol 12-hydroxystearate or polyoxyl hydrogenated castor oil and is present at a concentration of about 1% to about 5% (w/w).
   12. The composition of paragraph 12, wherein the IgY antibody is present at a concentration of about 1% to about 5% by weight.
   13. The composition of paragraph 12, wherein the IgY antibody is present at a concentration of about 10% to about 20% by weight.
   14. The composition of paragraph 1, wherein the composition comprises a combination of at least one antimicrobial IgY antibody, active against oral health compromising (OHC) microorganisms, and at least one systemically-acting active agent selected from one or more arthropodicidal isoxazolines, one or more macrocyclic lactones, one or more spinosyn compounds, one or more spinosoid compounds, one or more benzimidazoles, levamisole, pyrantel, morantel, praziquantel, closantel, clorsulon, one or more amino acetonitrile active agents, one or more insect growth regulators, one or more neonicotinoids and one or more aryloazol-2-yl cyanoethylamino active agents, or a combination of thereof
   15. The composition of paragraph 14, wherein the macrocyclic lactone is eprinomectin, ivermectin, selamectin, milbemectin, milbemycin D, milbemycin oxime, or moxidectin, or a combination thereof
   16. A method for the treatment and/or prevention of an oral health compromising (OHC) microorganism infection in an animal's oral cavity comprising administering to the animal an effective amount of the composition of paragraph 1.
   17. The method of paragraph 20, wherein the OHC microorganism is S. mutans, S. salivarius, S. mutans, S. sanguinis and S. sobrinus, P. gulae, P. salivosa, P. gingivalis and P. denticanis.
   18. Use of an antimicrobial IgY antibody of paragraph 1 in the manufacture of a soft chewable veterinary composition for the treatment and/or prevention of an OHC microorganism infection in an animal.
   19. A method of reducing the occurrence of dental caries or other oral health diseases or pathologies in an animal comprising the steps of:
[0232] a. selecting an animal with or at risk of developing oral health diseases or pathologies, including dental caries; and
[0233] b. contacting the oral cavity, and particularly the teeth, of the animal with a therapeutically effective amount of the antimicrobial IgY antibody-containing composition of paragraph 1; and
   [0234] wherein the antibody is present in a safe and effective amount to reduce or eliminate adherence of one or more oral health compromising (OHC) microorganism(s) that cause oral or dental diseases or pathologies, thereby reducing the occurrence of dental caries or other oral health diseases or pathologies.
      20. The method of paragraph 19 wherein the IgY antibody is specific for at least one of the following OHC microorganisms: S. mutans, S. salivarius, S. mutans, S. sanguinis and S. sobrinus, P. gulae, P. salivosa, P. gingivalis and P. denticanis.
      21. The method of paragraph 19, wherein the therapeutically effective amount of the antimicrobial IgY antibody reduces the number or adherence of the OHC S. mutans, S. salivarius, S. mutans, S. sanguinis and S. sobrinus, P. gulae, P. salivosa, P. gingivalis and P. denticanis.
      22. The method of paragraph 19, wherein the OHC is S. mutans.
      23. The method of paragraph 19, wherein the therapeutically effective amount of the IgY antibody disrupts dental plaque in the oral cavity of the animal.
      24. The method of paragraph 19, wherein the IgY antibody is an oral treatment form selected from a toothpaste, mouth rinse, gel, foam, varnish, polish, floss, dental tray, dental strip, copolymer membrane, and slow release bead.
      25. The method of paragraph 19, wherein the IgY antibody is present in the oral supplement in a dosage of less than 1 mg/ml.
      26. The method of paragraph 19, wherein the IgY antibody is present in the oral supplement in a dosage of less than 100 μg/ml.
      27. The method of paragraph 19, wherein the IgY antibody is present in the oral supplement in a dosage of 50 μg/ml.
      28. The method of paragraph 19, wherein the IgY antibody is present in the oral supplement in a dosage of 25 μg/ml.
      29. An oral treatment form comprising the IgY-containing composition of paragraph 1.
      30. The oral treatment form of paragraph 29, wherein the oral treatment form is selected from a toothpaste, mouth rinse, gel, foam, varnish, polish, floss, dental strip, copolymer membrane, and slow release bead.
      31. The oral treatment form of paragraph 30, wherein the IgY antibody is present in an amount of less than 1 mg.
      32. The oral treatment form of paragraph 30, wherein the IgY antibody is present in an amount of less than 100 μg.
      33. The oral treatment form of paragraphs 30, wherein the IgY antibody is present in an amount of 50 μg.
      34. The oral treatment form of paragraphs 30, wherein the IgY antibody is present in an amount of 25 μg.
      35. A kit comprising the oral treatment form of paragraph 30 and an applicator.
      36. The kit of paragraph 35, wherein the applicator is a toothbrush or dental tray.
      37. A composition, comprising:
[0235] a. a transfer agent;
[0236] b. a barrier material;
[0237] c. an antimicrobial IgY antibody, which is active in reducing or eliminating the numbers of one or more oral health compromising (OHC) microorganism from the oral cavity, including the teeth, of an animal.
   38. The composition of paragraph 37, wherein:
[0238] a. said transfer agent is present in an amount of 0.25 to 25 wt. %, based on the total weight of said transfer agent and said barrier material; and
[0239] b. said barrier material is present in an amount of 75 to 99.75 wt. %, based on the total weight of said transfer agent and said barrier material.
   39. The composition of paragraph 38, wherein said transfer agent is selected from lecithin, cetyl amine, N-tallow-1,3-propanediamine, hexetidine, and cetylpyridinium halide.
   40. The composition of paragraph 38, wherein:
[0240] a. said transfer agent is present in an amount of 3 to 5 wt. %, based on the total weight of said transfer agent and said barrier material;
[0241] b. said barrier material is present in an amount of 95 to 97 wt. %, based on the total weight of said transfer agent and said barrier material.
   41. The composition of paragraph 38, wherein said transfer agent is hexetidine.
   42. The composition of paragraph 38, wherein said barrier material is selected from natural waxes, synthetic waxes, silicone-based polymers, and fluoropolymers.
   43. The composition of paragraph 41, wherein said barrier material is a microcrystalline wax.
   44. The composition of paragraph 42, which is a film, a toothpaste, or a chewing gum.
   45. The composition of paragraph 40, wherein said transfer agent is cetylpyridinium halide.
   46. The composition of paragraph 45, wherein said barrier material is selected from natural waxes, synthetic waxes, silicone-based polymers, and fluoropolymers.
   47. The composition of paragraph 45 wherein said barrier material is a microcrystalline wax.
   48. The composition of paragraph 45, which is a toothpaste or a chewing gum.
   49. A composition, comprising:
[0242] a. a transfer agent;
[0243] b. a barrier material; and
[0244] c. an antimicrobial IgY antibody active agent, which is active in reducing or eliminating the numbers of one or more oral health compromising (OHC) microorganism from the oral cavity, including the teeth, of an animal;
[0245] wherein: said transfer agent is present in an amount of 0.25 to 25 wt. %, based on the total weight of said transfer agent, said barrier material, and said active agent;
[0246] said barrier material is present in an amount of 50 to 99.50 wt. %, based on the total weight of transfer agent, said barrier material, and said active agent;
[0247] said active agent is present in an amount of 0.25 to 25 wt. %, based on the total weight of transfer agent, said barrier material, and said active agent and said transfer agent is selected from cetyl amine, N-tallow-1,3-propanediamine, hexetidine, and cetylpyridinium halide.
   50. The composition of paragraph 49, wherein:
[0248] a. said transfer agent is present in an amount of 1 to 5 wt. %, based on the total weight of said transfer agent, said barrier material, and said active agent;
[0249] b. said barrier material is present in an amount of 85 to 98 wt. %, based on the total weight of said transfer agent, said barrier material, and said active agent; and
[0250] c. said active agent is present in an amount of 1 to 10 wt. %, based on the total weight of said transfer agent, said barrier material, and said active agent.
   51. The composition of paragraph 50, wherein said transfer agent is hexetidine.
   52. The composition of paragraph 51, wherein said barrier material is selected from natural waxes, synthetic waxes, silicone-based polymers, and fluoropolymers.
   53. The composition of paragraph 52, wherein said barrier material is a microcrystalline wax.
   54. The composition of paragraph 52, which is film, a toothpaste, or a chewing gum.
   55. The composition of paragraph 50, wherein said transfer agent is cetylpyridimum halide.
   56. The composition of paragraph 55, wherein said barrier material is selected from natural waxes, synthetic waxes, silicone-based polymers, and fluoropolymers.
   57. The composition of paragraph 56, wherein said barrier material is a microcrystalline wax.
   58. The composition of paragraph 57, which is a film, a toothpaste, or a chewing gum.
   59. A method of protecting teeth, comprising treating teeth with a composition, wherein said composition comprises:
[0251] a. a transfer agent; and
[0252] b. a barrier material;
[0253] c. an antimicrobial IgY antibody active agent, which is active in reducing or eliminating the numbers of one or more oral health compromising (OHC) microorganism from the oral cavity, including the teeth, of an animal;
[0254] wherein:
[0255] said transfer agent is present in an amount of 0.25 to 25 wt. %, based on the total weight of said transfer agent and said barrier material;
[0256] said barrier material is present in an amount of 75 to 99.75 wt. %, based on the total weight of said transfer agent and said barrier material; and
[0257] said transfer agent is selected from cetyl amine, N-tallow-1,3-propanediamine, hexetidine, and cetylpyridinium halide.
   60. The method of paragraph 59, wherein:
[0258] said transfer agent is present in an amount of 3 to 5 wt. %, based on the total weight of said transfer agent and said barrier material;
[0259] said barrier material is present in an amount of 95 to 97 wt. %, based on the total weight of said transfer agent and said barrier material.
   61. The method of paragraph 60, wherein said transfer agent is hexetidine.
   62. The method of paragraph 61, wherein said barrier material is selected from natural waxes, synthetic waxes, silicone-based polymers, and fluoropolymers.
   63. The method of paragraph 62, wherein said barrier material is a microcrystalline wax.
   64. The method of paragraph 62, wherein said composition is in the form of a film, a toothpaste, or a chewing gum.
   65. The method of paragraph 60, wherein said transfer agent is cetylpyridinium halide.
   66. The method of paragraph 65, wherein said barrier material is selected from natural waxes, synthetic waxes, silicone-based polymers, and fluoropolymers.
   67. The method of paragraph 65, wherein said barrier material is a microcrystalline wax.
   68. The method of paragraph 67, wherein said composition is in the form of a film, a toothpaste, or a chewing gum.
   69. A dental delivery system, comprising a substrate coated with a composition, wherein said composition comprises:
[0260] a. a transfer agent;
[0261] b. optionally a barrier material; and
[0262] c. an antimicrobial IgY antibody active agent, which is active in reducing or eliminating the numbers of one or more oral health compromising (OHC) microorganism from the oral cavity, including the teeth, of an animal;
[0263] wherein:
[0264] said transfer agent is present in an amount of 0.25 to 25 wt. %, based on the total weight of said transfer agent and said barrier material;
[0265] said barrier material, when present, is present in an amount of 75 to 99.75 wt. %, based on the total weight of said transfer agent and said barrier material; and
[0266] said transfer agent is selected from lecithin, cetyl amine, N-tallow-1,3-propanediamine, hexetidine, and-cetylpyridinium halide.
   70. The dental delivery system of paragraph 69, wherein:
[0267] a. said transfer agent is present in an amount of 3 to 5 wt. %, based on the total weight of said transfer agent and said barrier material;
[0268] b. said barrier material is present in an amount of 95 to 97 wt. %, based on the total weight of said transfer agent and said barrier material.
   71. The dental delivery system of paragraph 69, wherein said transfer agent is hexetidine.
   72. The dental delivery system of paragraph 69, wherein said barrier material is selected from natural waxes, synthetic waxes, silicone-based polymers, and fluoropolymers.
   73. The dental delivery system of paragraph 72, wherein said barrier material is a microcrystalline wax.
   74. The dental delivery system of paragraph 73, wherein said composition is in the form of a film, a toothpaste, or chewing gum.
   75. The dental delivery system of paragraph 74, wherein said transfer agent is cetylpyridinium halide.
   76. The dental delivery system of paragraph 75, wherein said barrier material is selected from natural waxes, synthetic waxes, silicone-based polymers, and fluoropolymers.
   77. The dental delivery system of paragraph 75, wherein said barrier material is a microcrystalline wax.
   78. The dental delivery system of paragraph 75, wherein said composition is in the form of a film, a toothpaste, or chewing gum.
   79. A dental delivery system, comprising a substrate coated with a composition, wherein said composition comprises:
[0269] a. a transfer agent;
[0270] b. a barrier material; and
[0271] c. an antimicrobial IgY antibody active agent, which is active in reducing or eliminating the numbers of one or more oral health compromising (OHC) microorganism from the oral cavity, including the teeth, of an animal;
[0272] wherein:
[0273] said transfer agent is present in an amount of 0.25 to 25 wt. %, based on the total weight of said transfer agent, said barrier material, and said active agent;
[0274] said barrier material is present in an amount of 50 to 99.50 wt. %, based on the total weight of transfer agent, said barrier material, and said active agent;
[0275] said active agent is present in an amount of 0.25 to 25 wt. %, based on the total weight of transfer agent, said barrier material, and said active agent and said transfer agent is selected from cetyl amine, N-tallow-1,3-propanediamine, hexetidine, and cetylpyridinium halide.
   80. The dental delivery system of paragraph 79, wherein:
[0276] a. said transfer agent is present in an amount of 1 to 5 wt. %, based on the total weight of said transfer agent, said barrier material, and said active agent;
[0277] b. said barrier material is present in an amount of 85 to 98 wt. %, based on the total weight of said transfer agent, said barrier material, and said active agent; and
[0278] c. said active agent is present in an amount of 1 to 10 wt. %, based on the total weight of said transfer agent, said barrier material, and said active agent.
   81. The dental deliver system of paragraph 80, wherein said transfer agent is hexetidine.
   82. The dental delivery system of paragraph 81, wherein said barrier material is selected from natural waxes, synthetic waxes, silicone-based polymers, and fluoropolymers.
   83. The dental delivery system of paragraph 81, wherein said barrier material is a microcrystalline wax.
   84. The dental delivery system of paragraph 81, wherein said active agent is chlorhexidine.
   85. The dental delivery system of paragraph 81, wherein said composition is in the form of a film, a toothpaste, or chewing gum.
   86. The dental delivery system of paragraph 80, wherein said transfer agent is cetylpyridinium halide or lecithin.
   87. The dental delivery system of paragraph 86, wherein said barrier material is selected from natural waxes, synthetic waxes, silicone-based polymers, and fluoropolymers.
   88. The dental delivery system of paragraph 86, wherein said barrier material is a microcrystalline wax.
   89. The dental delivery system of paragraph 86, wherein said active agent is selected from hexetidine and chlorhexidine.
   90. The dental delivery system of paragraph 86, wherein said composition is in the form of a film, a toothpaste, or chewing gum.
   91. A method for producing antimicrobial IgY antibodies, which are effective in reducing or eliminating oral health compromising (OHC) microorganism, comprising the step of administering to a hen at least one OHC microorganism-associated polypeptide having a sequence having at least 90% identity to an immunologically sufficient portion of a sequence as set forth in any one of the following sequences: SEQ ID NO: 227-349.
   92. A composition comprising one or more antimicrobial IgY of paragraph 91.
   93. A method of treatment comprising the step of administering one or more antimicrobial IgY of paragraph 91.
   94. A method for producing antimicrobial IgY antibodies, which are effective in reducing or eliminating oral health compromising (OHC) microorganism, comprising the step of administering to a hen at least one OHC microorganism-associated polypeptide having a sequence having at least 90% identity to an immunologically sufficient portion of a sequence as set forth in any one of the following SEQ ID NOs: 110-113, 120, 123-125, 130-133, 135-138, 143-148, 221-224 or 227-349.
   95. A composition comprising one or more antimicrobial IgY of paragraph 94.
   96. A method of treating an animal in need thereof comprising the step of administering one or more antimicrobial IgY of paragraph 94.
   97. A method for alleviating sensitivity of teeth, comprising sensitive teeth with a composition, wherein said composition comprises:
[0279] a. a transfer agent; and
[0280] b. a barrier material;

[0281] wherein:

[0282] said transfer agent is present in an amount of 0.25 to 25 wt. %, based on the total weight of said transfer agent and said barrier material;

[0283] said barrier material is present in an amount of 75 to 99.75 wt. %, based on the total weight of said transfer agent and said barrier material; and

[0284] said transfer agent is selected from lecithin, cetyl amine, N-tallow-1,3-propanediamine, hexetidine, and cetylpyridinium halide.

The application's sequence listing, which the Patent Office published only in electronic form, follows.

SEQUENCE LISTING (349 sequences)

SEQ ID NO: 1 - DNA, 1362 bp, Porphyromonas gingivalis
ttctgtgtcatggcaaaagttataaaaacaaaaaaaggccttgcacttaatctgaaaggaaaaccgctgcccgagatgctggccgaaccggcccaaagtcctacttacgcggtcgtgcccgacgattttgaaggtgttatccccaaggtgacggctcgtccgggggataaggtgcgtgccggctcagcactgatgcaccacaaggcatatccggagatgaagtttacaagtccggttagcggcgaagtgatcgcggtgaatcgcggtgccaagcgcaaggtgttgagcatcgaggtgaaaccggacggactgaacgaatacgagtcattccctgtcggggatccgtctgccctctctgccgaacagatcaaggagcttttactgtcgagcggtatgtggggttttattaagcaacgtccttacgacatagtggctacaccggatatagctccacgcgacatttatattactgccaactttactgcaccattggctccggacttcgatttcatcgttcgaggagaagaacgcgccctgcagactgccatcgatgccttggccaaactcacgacaggaaaggtgtatgtgggcctgaagccgggttcatctctgggcttgcacaatgcagaaatcgtagaagtacacggacctcatccggcaggtaacgtgggcgtgctgatcaatcatacgaagccaatcaatcggggcgaaacggtgtggacgctcaaggctaccgacctgatcgtgatcggacgtttcctgcttacgggcaaagccgattttaccagaatgattgccatgaccggctcagacgctgcagctcacggatacgtccgtattatgccgggttgcaatgtctttgcttccttccccggccgactgacaataaaggaatctcacgagcgtgtgatcgatggcaatgtgctgaccggtaagaagctctgcgagaaggagcctttcctgtcagcccggtgtgaccagatcacggtgatccccgaaggcgacgatgtggacgaactcttcgggtgggctgcaccccgtctcgatcagtacagcatgagcagagcttatttctcttggttgcaggggaaaaacaaagagtacgtactcgatgcccggatcaagggtggcgaacgtgctatgatcatgagcaacgagtatgaccgcgttttcccgatggacatctatccggagtatttgctcaaggctattatagcattcgacatcgacaagatggaggacttaggcatatatgaagtggctccggaggactttgccacttgcgaatttgtggatacatccaagatcgagctgcagcgtatcgttcgcgagggcttggatatgctctataaggaaatgaat

SEQ ID NO: 2 - DNA, 603 bp, Porphyromonas gingivalis
gaactaagcaagtgttacatggataaagtgagctatgctctgggattgagcatcggtaataatttcaagtcttcgggcatcgacagcgtcgttatggatgatttcatgcaaggtctgtctgatgtactggaagaaaaagcccctcagctctcgtatgacgaggccaagcgcgaaatagaggcgtatttcatggatttgcagcagaaggctgtcaaactgaacaaagaggccggagaagaattcctcaagataaatgcacacaaggaaggtgtgacgaccttaccgagcggcttgcaatacgaagtcattaagatgggagagggcccgaaacccaccctttcggacacggtaacctgtcattatcacggtacgctcatcaacggtatcgttttcgatagctctatggacaggggagaaccggccagtttccctctaagaggagttatagccggctggacggagattcttcaattaatgcctgtaggatccaagtggaaagtaactataccgagcgatctggcgtatggagatcgtggtgccggcgaacatatcaaaccgggtagtacgctcatttttataatcgaattattgagtatcaacaaa

SEQ ID NO: 3 - DNA, 837 bp, Porphyromonas gingivalis
caaaaaaacaaacgaaagatgaaaaaagcattacttattggtgctgctcttttgggagcagtcagttttgcaagtgctcagtctttgagcacaatcaaagtacagaacaattcagtacagcaacctcgtgaggaagccactattcaggtttgtggagaattggcagagcaagttgactgcattgggacaggtaattctgcaatcatagccgctgcagcgaaatttgaaagcgatgatctcgaaagctatgttggctgggagatcatgagtgttgatttcttccctggatataaagcgtgcaagtacacatctgcagtctgggctgatgatatgaccattttgggccaatcagaagatagtgatcccgaaatgcagactatcaacaatcttgctctcaagactagtgtcaagattgaagccggcaagaattacatagttggttatattgctaataccgcaggtggacatcctatcggatgtgatcagggccctgccgttgatggttatggagatttggtttctatatcagaagatggtggtgctactttccctccgttcgaatctcttcatcaagcagttcctaccttaaattacaacatctatgtcgttgttcatttgaagaagggtgaaggtgttgaggctgttcttaccaacgacaaggctaatgcttatgttcagaatggcgttatctatgtagccggagctaatggtcgtcaggtatctctgttcgacatgaacggtaaggttgtttataccggcgttagcgaaacgattgcagctcctcagaagggcatgtatatcctccgtgtaggtgctaagagcatcaagctggctatc

SEQ ID NO: 4 - DNA, 1686 bp, Porphyromonas gingivalis
acaagaaatgtttcactcataaaaatgccaagaattatgaaattaaaaattgcactcagactgctgctggcgacttttgccatagttttatttagccctctggccaaggcccagatggatattggtggagacgatgtattgatcgagacgatgtccaccctatcaggatattcagaggatttttattacaagatggctgtggcagacaatggatggatctatgtgatgttggatttctctcgtatttattttgatgatgtcaggctgtatcgttccaaagacggtggtgctacttaccaaaagttagggtctttggggtctttggtgccttatgacttcgatgtctcgcattgcgattttattgtaacgggaaaggatgaagatgatatcaatgtttggacagtcatgacagcattcgaatatgtaggtggtactattggcaatggcgttttgctgatgcatcgccatgatgcagatatcaataatacagagtgtgtgtacaagaaggatttccctaataatagactgatgggtgtagccatcgcctccaactaccgtgcgccctctccttacggtttggggggcgatccttttgctctcgctgtcgccgttagtggctccggaagcgatcacagcttcttggactatattttttcgttagatggtggagtacactttgagcaaaagcgtatttacacaagaccccaaaaactgactatcaatagagtagacctttcattaggcagtacatctccttctcttggatttaatacttggccactaatgggagtcgtattcgaaatgaataagaaccttgatggcttcgacattggtttcatttccaactttgtggactatgatccccgctatgcgtggtctgaaccgataataatagaagaagactgtggatggactgattttaatcctttgggagcactaagtatagagatccaaatgatgttggatgacaattcggataataccgtgggtggagaacgctcccataacttcctgatcacttacccgggccattacgtatatccgaagcaatctttcaattattctcccggacatacaccgacaaagaaagatctggtctttaaacactgtataggtattccggctttggcatacgataaggaaggcgatcgttatctgactacttttcaagatcacaatctaatgagatacagatggatcaaatacgatgacattaactctttttatggttggagttggccatatgtatatgcaaaagaagctaaagataaaaagaggcgccgtccgcaagtagcactcaatcctaccaatggaaaggcttgttgggtatggcatactcgcaagagcccatatgatgaaaccaaaccacatcctactcctgtaattattaaacatttcctatggtccgatacggagtgggtacatgctctggacgtgggggacgtattgcagaaggagggtagcatgaagctctaccccaatcctgccaaagaatatgttctgatcaacctacccaaagaaggggggcacgaggcagtcgtatacgacatgcagggccgaatcgtggagaaagtttcattttcagggaaagaatataagctgaatgtgcagtatctgtccaaaggtacgtacatgctgaaagttgtagcggatacggagtatttcgtggaaaaaatcattgtagag

SEQ ID NO: 5 - DNA, 1173 bp, Porphyromonas gingivalis
caaatgaaacgattactcccctttctccttttagcaggactcgtagccgtaggaaacgtgtctgctcagtcaccccgaatccctcaagtggatgtacacactcgcatcgcaagaaatgcccgttatcgactggacaagatcagtgtcccggattctcgtcagatattcgattacttctataaagaagaaacgatacccactaaaatacaaacgaccacaggaggtgcaattacaagcatcgattcgcttttctatgaagacgacaggttggttcaggtgcgctattttgacaataaccttgaattaaaacaagcggagaagtatgtatacgacggttctaagctggtccttcgagaaattcgcaagtcgccgacagacgaaacgccaataaagaaagttagctatcactatctctgtggcagcgatatgccttttgagattacgacagagatgagcgatggctattttgaaagccatacgcttaactatctgaatggaaagattgcccgaatagatatcatgactcaacagaacccatcggccgaattgatcgaaacgggtagaatggtatatgagtttgatgccaataatgatgctgtactgcttcgtgacagtgtatttcttcctcttcaaaacaagtgggtagaaatgtttactcaccgttatacatacgacaataagcataattgtattcgttgggaacaagacgaattcggcaccctcacccttgccaacaacttcgaatacgacaccactatccctctgtcgtctgtattgttccccacgcatgaggagttcttccgtcctcttcttcccaattttatgaagcatatgcgtacgaagcaaacgtatttcaataactccggagaaggcttgtcagaggtatgcgattacaactacttctataccgatatgcagggtaatgcactgaccgatgttgccgtgaacgaatcgatcaagatttatcctcgtcctgccacggattttctgcgtatagaaggttcgcaactgcttcgcctttcgctattcgacatgaacgggaagctcatcagagctaccgaattgacaggcgatttggccattatcggagttgcatctcttccgagaggcacttacatcgcagaaataactgctgcaaacagcaaaaccatacgtgcaaaagtatcgctcaga

SEQ ID NO: 6 - DNA, 972 bp, Porphyromonas gingivalis
ctaacgttgttttgttgcaactatttcaaacagatgagagcaaacatttggcagatactttccgtttcggttctctttttcttcgggacagcgatcggacaggctcagagtcgaaaccgtacatacgaggcttatgtgaaacagtacgccgacgaagctatccgacagatgagccgctacaatataccggcaagcatcaccatagcacaggctttggtggagacaggagccggagccagtacactggccagcgtacacaacaatcacttcgggatcaaatgccacaaatcgtggacgggcaagcgcacctatcgtaccgacgatgcgccgaacgaatgcttccgcagctattcggccgctcgcgaatcgtatgaagatcattcccgatttctgctccaaccacgctatcgtcccctgttcaaactcgacagagaagactatcggggctgggctacggggttgcaacgctgtggctatgccaccaatcggggctatgccaatctgctgatcaagatggtggagctgtatgagctatatgctttggatcgcgagaagtacccctcatggttccacaagtcttaccccgggtccaacaaaaaatcccatcaaacgaccaagcagaagcagagcggactcaagcacgaagcttacttcagctacggactgctctacatcatagccaagcaaggcgataccttcgattctttggccgaagagttcgacatgagagcctccaaactggccaaatacaacgatgctcccgtggatttcccgatcgaaaagggcgatgtgatctatctggagaaaaagcacgcatgctccatctccaaacacacacagcacgtagtgcgtgtgggcgattcgatgcacagtatctcccaacgctatggcatccggatgaagaacctctacaagctcaacgacaaggatggcgaatatataccccaagagggcgatatactgcgcttgcgc

SEQ ID NO: 7 - DNA, 1119 bp, Porphyromonas gingivalis
gggtcttgtggaagtagcccagcaattggccgatcagggtgttcgcgttgtgatcgccggattggacatggactttcgacgtcagcctttcggacctatgccgggcttgtgtgccatagccgactccgtgaccaaagttcatgccgtgtgtgtggaatgcggccgattggccagctattctttccgtcgtgtccaaggcgatcagcaagtgatgctgggcgaactgaacgaatacagtcccctctgcagaacctgctacaggaaatgcagttctcccccacaaacagaagaaatccattcgacaatatgaatagcagacatctgacaatcacaatcattgccggcctctccctctttgtactgacattgggcggctgctccgtagcccaacaagatacgcagtggactctcggcggaaagctctttacttcggcgtggatacaacgttcggccgaatatcaagcgctttgcattcaggcatacaacatcgctacggaaagagtggacgctctaccggcagaacgtaaacaaggagataggccttatgccatcgtaacggacatagacgaaaccattttggacaatacgcctaactccgtgtatcaggctctcaggggcaaggattatgatgaagagacttgggggaaatggtgtgcacaggccgatgccgacacactggcaggagctttgtctttcttcctccatgcagcgaacaaggggatcgaggtcttttacgtcaccaaccgcagagacaatctgcgcgaagcaactcttcagaaccttcagcgttacggattcccctttgccgatgaagaacatttgcttacgacccatgggccatccgacaaagaaccccgtcggctcaaaatacaagaacagtatgaaatagtattgctcataggagacaacttgggcgacttccaccacttcttcaatacgaaagaagagtccggacgcaaacaggctctgggcctgacagccggggagtttggccggcacttcatcatgctgcccaatcccaactacggatcttgggaaccggcatggtacggcgggaagtatccgccactgcccgaaagagacaaagcacttaaacaactgcactcacagaacagcaga

SEQ ID NO: 8 - DNA, 2289 bp, Porphyromonas gingivalis
cattttttagtaacgattatgcggacaaaaactatcttttttgcgattatctcttttattgctctattgtcgtcttctctgtcggctcagagcaaagccgttttaaccggtagtgtgtcggatgccgaaaccggagagcctcttgccggtgctcgaatcgaagtcaaacacaccaacatagtagccggtgccgatgccggcggacatttcgagatcaagaacctgccggcagggcagcatactattatatgttcgttgggggggtatggacagaaagaggaggtggttgccatcgaagccggacagaccaaaacgatctcttttgcattgcgactgcgaacgaacaacttggaggaagtcgtcgttaccggtaccggtacacgttaccgcttggtcgatgctcctgtggcaacggaagtccttaccgctaaggacatagcctctttctcggctcctacttccgaggccttattgcaggggctgagtccgtcttttgacttcggccccaatctgatgggctctttcatgcagctgaacggccttagcagtaagtatatcctcatccttatcgatggtaagcgtgtgtacggcgatgtaggcggtcaggccgatttgagtcgtatttctcctgatcagatcgaacggatcgaactggtgaaaggtgcttcgagttcgctctacggatccgatgccatcgccggggtaatcaatgtgatcacaaaaaagaatacgaatcgactgagtgcatatacgtcacatcgcatatcgaagtacaacgatcggcaaaccaatacttcgctcgatataaacatcggtaagttcagtagcaataccaactatttcttctaccatacggatggctggcagaatagtccgttcgaaataaaaaagaaaaaaggatccggcgaaccggtcttggaggaaacgtataagaaaacttttcgtgcacaggaaaatcagggtgtaagccaatcgctttcctattatgcaactaacaatcttagcttcagcggaaatgtgcagtacaataaacgtcagatcttcactccgactttttccgaaaagaaggcctatgacatggattatcgtgctttgacggcttcactcggtacgaactatcttttccccaatggtctgcatacgctttctttcgatgccgtctacgatcgcttccgtttcggatatttgtatcatgacaaggacagcagtgagagcctgatcaacaaccaaggtcagaccgagcaacccacattctttccgggtcagctacgcaataaaaacgatcagatccgatacacggcagaggctcgcggtgtatttacactgccttatgcgcagaaactgaccggcggtttggagtatttccgtgaggaattgatctctccctataatttgattaccgacaaggcagatgcttccacgctctctgcttatgtacaagatgaatggaaaccgctcgattggttcaatatgacagccggtttccgtctggtacaccatcaggagttcggtacacgaatgacgcctaaggtatccatactcgccaagtatgggccgctgaacttccgcgctacgtatgctaacggctataagactcccacgctgaaagagctttttgcacggaacgaactcaccactatgggttcgcacaatctctatctcggcaatgcggatcttaagccacagatgtcggattattatgctttgggcttggagtacaatcaaggccctatctcgttcagtgcaacggtttatgacaatgaacttcgcaatctgatctcctttatggatataccgacctcacccgagcacgaagctcagggaatcaagaaaaccaagcagtatgccaacataggaaaagctcgcagccgcggccttgatgtcctatgtgatgcctctatcggttggggtatcaagttaggagccggatacagcctcgtggaagctaagaatctccagacggatgagtggctggaaggagctgcacgtcatcgtgccaatgtgcacgccgattgggttcactactggggtcagtatagacttggcgtgagccttttcggccgtattcagagcgagcgttactacaaagacggcaatgctccggactataccttgtggcgactcgccacatcgcatcgtttcgctcatttccgccacatcatcctggatggaacgctcggtatagacaacctgtttgactacgtggatgatcgtcctatgggtgtcaattatgctaccgtaacgccgggacgtactttctttgctcaaatagcgattcgattcaacaac

SEQ ID NO: 9 - DNA, 1095 bp, Porphyromonas gingivalis
tgctgcgcaaggcttcgggacacctctccccggaagaagtcgtttcggaatgataccgtttttccttatttcgttattcatctgatcaaacatattatcattatgacggacaacaaacaacgtaatatcgtattcccggcgtttctcctcttgctgggagtcatcgcagtggtgacgatcgttggttttttcatgctcagaccggccgaggagattatccaaggacagatagaagtgaccgaataccgagtgtccagcaaagtgcccgggcgcatcaaggaacttagggtatccgagggacagcaggtgcaggccggcgataccctcgctgtcatcgaagcccccgacgtagcggctaagatggagcaggcaaaggctgccgaagcagctgcacaggctcagaacgccaaggctctcaaaggagcacgcagcgaacagatacaggcagcctatgagatgtggcagaaagctcaggccggcgtagccatagcgaccaagacacaccagcgcgtgcagaacctctatgaccagggagtggtaccggctcagaagttggacgaagccactgcccagcgcgatgcggccatcgctacgcaaaaagcggccgaagcccagtacaatatggctcgcaacggtgccgaacgcgaagacaagctggcagcttctgccctcgtcgatagagcgagaggagccgtcgccgaggtggagtcgtacatcaacgaaacctacctcatcgccccacgggcaggcgaagtgtcggagatattccccaaagccggcgaactcgtaggtaccggcgcacctatcatgaatatcgccgagatgggcgatatgtgggccagctttgccgttcgtgaggatttcctcagcagcatgaccatgggagccgttctggagactgtggtgccggctctgaatgaagaaaaagtacgcttcaagatcacattcatcaagaacatgggtacctatgctgcctggaaagcgaccaagacaacagggcagtacgacctgaagaccttcgaggtaaaggccacccttgcggataaagacaaggcacaaaagctacgcccgggtatgtccgtgatcatacgcaag

SEQ ID NO: 10 - DNA, 3138 bp, Porphyromonas gingivalis
gacttcccttgggttagggtaaaaccggagaagaaaagaaaacaacataacagtaataattttaagtttaacgcaaaagaaaagtctatgaaaagaatgacgctattcttcctttgcttgctgacgagcattgggtgggctatggcccagaatagaaccgtgaagggtacagttatctcctccgaggataatgagcccctgatcggcgcgaatgtcgtggttgtcggaaacaccactatcggtgctgcaaccgacttggatggcaacttcacgcttagcgtgcctgccaatgccaaaatgttgagagtgtcctattccggtatgactaccaaagaggtcgccatcgctaatgtgatgaagatcgtactggatccggactctaaggttctggagcaggtagttgtattgggttacggtacgggacagaaactcagcactgtttccggttctgtggccaaagtgtccagcgaaaagctcgcggaaaagcccgttgccaatatcatggatgccctccaaggtcaggtagccggtatgcaggttatgactacatccggtgaccctactgccgtcgcttctgtggagatccatggtacagggtcgttgggggcaagctctgcaccattgtatatcgtggatggtatgcaaacttctttggatgttgtggctacgatgaatccgaatgattttgaatctatgtccgttttgaaagatgcttctgcaacatctatttatggagctcgtgctgcaaacggagtcgttttcattcaaacgaagaaaggtaaaatgagcgagagaggtcgtattacctttaatgccagttacgggatttctcaaatcctgaatactaagccccttgataatatgatgactggagatgaattgctggattttcaggtgaaggcaggtttttgggggaacaatcaaaccgttcagaaggttaaagatatgatccttgccggagctgaagatttgtatggcaattatgattctttgaaagatgagtatggtaagacattgttcccagtggattttaatcatgatgcagactggctcaaggctttgtttaaaacagcacccaccagtcaaggtgatatttctttctccggagggtctcagggaacttcatattatgcctctataggctacttcgatcaggaaggtatggctcgtgaaccggcaaattttaagcgctatagtggccggctcaacttcgaaagtcgtatcaatgaatggctgaaagttggtgcaaatttgtctggtgcgatagcgaatagacgatctgccgactattttggaaagtattatatggggtcaggtactttcggtgtgttaacgatgcctcgttattataacccttttgatgtgaatggggatttagcagatgtctattacatgtatggagctaccagaccttctatgacagaaccgtacttcgcaaaaatgagaccgttcagttccgaatcacatcaggccaatgtaaatggtttcgcccagattactccgatcaaaggccttactttaaaggcacaggctggtgttgatattactaatactcgcacttcttctaagagaatgcccaataatccgtatgattctactcctcttggggaaagaagagaaagagcttatcgagatgttagcaagtcttttacaaatacggctgaatataagttttcaattgatgaaaaacatgatcttacagcattgatggggcatgaatatattgaatatgaaggggatgttattggggcatcttctaaaggatttgaaagtgataagttgatgttactgagccagggaaaaaccggaaatagtttgtctttgcctgaacacagagtcgctgaatatgcctatttgtctttctttagtcgttttaattacggttttgacaaatggatgtatatagatttctctgttcgtaatgaccaatcctctcgattcggatccaataatagaagcgcgtggttctattctgtcggtggaatgtttgacatatataataaattcattcaagaaagtaattggctcagtgatcttcgactgaaaatgagttatggtacaacgggtaactcggagattggtaattacaaccaccaagcactcgttactgtgaacaattatactgaagatgctatggggcttagcatttctacagcaggcaatcccgacctctcgtgggaaaagcagtctcagttcaacttcggtttggctgcaggggctttcaataatcgcttatctgcagaggtagatttctatgtccgcactacgaatgatatgttgattgatgtcccgatgccttatatcagtggtttcttctcacagtatcagaatgtaggctctatgaaaaatacgggtgtagacctttctcttaaggggacgatctaccaaaataaggactggaatgtatatgcttctgcgaatttcaactacaatagacaggaaataacaaagcttttcttcggtctcaataagtacatgttgcctaataccggtactatatgggaaattgggtaccccaattcgttctatatggctgaatatgctggaatcgacaaaaaaaccggtaagcagttgtggtatgttcctggtcaagtcgatgcggatggtaataaagttacaacaagccagtactcagctgacttggagacacgaattgataagtctgttactcctcctattacaggtggtttctccttaggtgcttcttggaaaggactttctttagatgctgattttgcctacatcgttggtaaatggatgatcaataatgaccgttactttacagagaatgcaggtggattgatgcaattaaataaagataaaatgctattgaatgcctggacagaggataataaagaaacagatgttccaaaattgggacagtctcctcagtttgatacgcatttgttggagaatgcttctttcctgcgtttgaagaatctcaaactcacctatgtactccccaatagtctttttgctgggcagaatgtgattggtggagctcgtgtctatttgatggcgcgcaatctgttaactgttacgaagtataaaggctttgaccctgaagcaggggggaatgtgggaaaaaatcaatatcctaattctaagcagtacgttgcgggtattcagttgtctttc

SEQ ID NO: 11 - DNA, 2607 bp, Porphyromonas gingivalis
tggcataggaatatttttatctttgcgagtacatttagcccgaaaaatatgctcccactgccataccgttatgcaaaaaccgagcacctttttctcgcaaaaggatactgcaagaatccaataacaaacataattatcctatttatgaagaaaaagaattttttgcttcttggcattttcgttgctttgctgactttcatcggcagcatgcaggcacaacaggccaaagattatttcaactttgacgaacggggcgaggcctacttctcattcaaagtgcctgatagggccgttctacaagagctggctctgatcatgtccatcgacgagtttgaccccgtaaccaatgaagccattgcctatgccagcgaagaggagttcgaggcattcctgcgctatgggctcaagcctacattcttgactcctccatccatgcagcgcgctgtcgagatgttcgactaccgctcaggagaaaaatacgaatggaatgcttaccccacctatgaagcctatatcagcatgatggaagagttccaaacaaagtatccatcactttgtactacttccgtcattggcaagtccgtaaaggatcgtaaactgatgatttgcaagctgacgtcctctgccaatacagggaaaaagcctcgcgtgctctatacttctacgatgcacggagacgaaacgaccggatatgtggtactgctccgactcatagaccatctgctgtcgaactacgaatccgatccgaggattaagaacattctggataaaacggaagtatggatctgccctttgaccaatccggacggagcatacagagccggaaaccacaccgtacaaggagctactcgctacaatgccaacaatgtcgatttgaaccgtaacttcaaggatgatgtagccggtgatcaccccgatggaaaaccttggcagccggaggcaactgcattcatggatttggaaggaaacacctctttcgtgctcggtgccaatatacatggaggaacagaggtggtgaactatccatgggataataaaaaagaaagacatgcagacgatgagtggtacaaactgatcagtcgcaactacgcagccgcttgtcagagtatttccgccagctacatgacctccgaaaccaattcgggaatcatcaacggttcagactggtatgtaattcgcggaagtcgtcaggacaatgcaaattatttccatcgtctgcgagaaattacccttgaaatcagcaacacgaagttggtgccggcctctcaacttccaaagtattggaatctgaacaaagaatctctgcttgctctgatcgaagaatccttatacggcatccatggtacagtgacttccgctgcgaacggacagcctctcaaatgccagatcttgatagaaaaccatgacaagcgcaactccgatgtttactccgatgctaccacaggctactacgtacgtcctatcaaagccggcacttatacggtgaaatacaaagccgagggttatcctgaggcaactcgtaccattacgatcaaggacaaagaaaccgtcatcatggacattgcattgggcaactcggttcctctgcctgtacccgatttcacagcttctcctatgaccatctcagtaggcgaaagcgtccaattccaagatcaaacgacaaataaccccacgaattgggagtggacgttcgaaggcggacagcctgccatgagtacagagcagaatccgctcgtatcctatagtcatcccggtcagtacgacgttacgctcaaagtgtggaatgcaagtggttccaacacgattacgaaagaaaaattcatcactgtcaatgccgttatgcctgtagctgaattcgtcggtaccccgacggaaatagaagagggccagacggtatctttccaaaaccaatccaccaatgccaccaactacgtatggatattcgatggcggcactcccgctaccagtgaagacgaaaacccgactgtgctttacagcaaagccggccaatacgatgtcacgctcaaggcgatcagtgcttccggtgaaacggtgaagacgaaagaaaaatacatcactgtcaagaaagctccggtccctgctccggtagccgacttcgaaggaacacctcgaaaagtaaagaaaggcgagacagttactttcaaagacttgtctacgaacaatccgacttcatggctttgggtgttcgaaggcggctctcctgccaccagcacggagcaaaacccggtggtcacctacaatgaaacaggcaagtacgatgtccagctgactgccaccaacgagggcggaagcaatgtgaagaaagcagaagactacattgaggttatcctcgatgacagtgtcgaggacatagtggcacagacgggtatcgtcattcgtccgcaaaacggaacgaagcagatcctcatagaagccaacgctgctatcaaagcgatcgttctctatgacatcaatggacgggtcgtactcaaaactactccgaatcagctccgctcgaccgtagatctttccatcctgcccgaaggaatctacaccatcaatatcaaaacggaaaaatccgctcgcacggaaaagatccatatcggg

SEQ ID NO: 12 - DNA, 318 bp, Porphyromonas gingivalis
ctttcgtacagtggagagagcgatgcaaaagagtctgatcagaattgccggaaatgtaccttcatcggctttgaaaaacgagtaaatacgatgcgactgatcaaggcttttctcgtgcaactcttactgctccccattttcttctacaagcggtttatatcgccgcttacaccgccttcatgccggtttaccccctcatgttcgtcctatgccatcgaagccttacgtaaatatggcccgggcaaaggactattgctgagcatcaagcgtattctccgctgtcacccgtggggtggaagtggctatgaccccgttccg

SEQ ID NO: 13 - DNA, 1368 bp, Porphyromonas gingivalis
agaggaggacaaatccgccgacaccataccgattcgtcaaggggatcggacagcaaagcctgccgcttctcctttcatgccgagaccatcggtttctccaaccaccaaagagcaaaaatgaattacctgtacatactgattacacttttactctccggctttttttccggtgctgagattgctttcctttcttcggacaaactgcgtcttgagttggacaggaatagaggcgatctcacaggcagagcgttaaacttgctgtatcgacatccggaccaactggtgactactctccttgtgggtaataatatcgttttggtagtctatggtctgctgatggcgggattgctggccgcacctttggcgcaatggattgataacgatgctatgatcgtcgttctccaatctgtcttatccactatcatcatactgtttaccggggaatttctacccaaagccattttcaagaccaatgccaatatgatgatgagggtattcgccctccctatcgtagcgatctattatctgctttatcctctgtctaaactcttcaccggtttatctcgctcttttattcgtctggtggacaagaattatgtgcctacaacagtagggttggggcgcgtagatctcgatcattatttggcagaaaatatgtccggagaaaacgaacagaacgacttgactaccgaagtgaaaatcatccagaatgcgctggatttttccggtattcaggtgcgagactgcatgatcccacgcaatgagatgatagcatgtgagttgcaaacggatattgaagtactcaaaacgacttttatcgataccggtttgtccaagatcattatctacagacagaacatagatgacgtagtaggatatatccattcgagcgaaatgtttcgtgggcaagactggcaaaaacgtatcaatactactgtattcgtacccgaaagcatgtatgccaataaactgatgcgactactcatgcagcgcaagaaaagcattgcgatcgtcatcgatgaacttggaggtacggccggaatggtcacattagaggatttggtagaagagattttcggtgacattgaggacgaacacgacactcgcaagatcatagccaaacagctcggccctcatacctatctggtcagtggtcgtatggaaatagatgatgtgaacgaacgttttgggttgtccttgcctgagtctgacgactaccttaccgtggccggatttatcctgaatagccatcaaaatatcccacaggccaatgaggtcgtggagattgctccttatacttttaccattctcagatcttcttccaccaagatcgaactggtgaaaatgtccatcgacgaccaatcgaac

SEQ ID NO: 14 - DNA, 897 bp, Porphyromonas gingivalis
ttaaaaaaggagataactatgaaacagaactacttcaaaagagtctgctcactgctttggctggttttacccatgcttattatgccattggaagtagcagctcaagagattattccgaacgaagaggtgttggaatcattgactttcgttgcaccggttgaggagacagacgcaatagaggcagaggtagaagctctgcaggagatagtcgctactgaggagattgcggagcaggctgttcgttcttatacctacacggtctatcgtgatggcgtgaagattgcttcaggattgactgagcccacttttctcgatgaagatgttcctgccggcgaacatacctactgcgtagaagtacagtatcagggaggcgtatccgacaaagtatgcgtggacgtagaggtgaaggacttcaaaccggttaccaatctcaccggaactgcttccaatgacgaagtttctttggactgggacggtgtggaagagaaagctgaagagccggcaagtgataaagcagtcagctacaacgtctacaagaatggaaccttgatcggtaatacagctgaaactcattatgtggagaccggtgtagccaatggtacatacatctacgaagtggaagtaaagtatcctgacggtgtatctccgaaggtggctgtaaccgtgaccgtgaccaacagctcattgagcaatgtagatggacaggctccttacacattgcgagtagaaggcaagaagattattgcggaagcccatggtatgatcacgctctacgacatcaacggacgtaccgtggccgtagccccgaatcgattggaatacatggcgcaaaccggtttctatgcagtgcgcttcgatgtggggaataaacaccatgtatcgaaaatacaagtaaga

SEQ ID NO: 15 - DNA, 1131 bp, Porphyromonas gingivalis
ttgtttaatcataaaaaatcatggtatgaaacatttcaattttatctcgttgttttccgctctggctttattcttttgtgtgaaaatacccttgcacaacaaaaaacagaggagtttgcacctgtgtcggatttacgtgcagaagcgtacggctctaccgttttcctccactggactccgccgtatgacaatccgatgattcctctaagcgagagttttgaatcaggtattccagctatatggaagaccattgacgcagatggcgatggctataattggatgcatttgaccaatttcacgggacagagtggtctctgtgtctcttcggcttcatacataggcggcgtcggagctttgactccggacaattatctgataacacccgaattaaaactacccacagacgcgttggtggaaataatctattgggtatgtactcaagatctcactgctccatcggagcactatgccgtttattcctcttctacaggcaataatgctgctgactttgttaatctcttatatgaagagactttgactgccaaacggatacaatcccccgagttgatccgcggaaatcggacacaaggtgtttggtatcaaagaaaggtggtactccctaacgatactaaatatgttgctttccgccattttaattccacggataatttctggctcaatttggatgaagtatctatcctgtatacccctcttccccgaagagctccgtgtccgcatccgggtggttacacttattctgtattccgtgatggacaaaagatagcgagtggattgtcggcattggcatatatcgatacggatgtaccgtatgggactcaagactattgtgtccaagtcaattatctgcaaggagactcgtataaagtctgcaaaaatatagtggtggcaaattctgcaaacatctatggggcggataagccttttgcgttgaccgtggttggcaagaccattgtagcgagtgctttcaaaggagagatcactctttatgacattcgtggccggctgatagcttccggctgcgatacgcttaggtacaaagcggaaaatggtttttacctcattaaaatacaggtaaacggaactgtctatactgagaaaatccaaatccaa

SEQ ID NO: 16 - DNA, 2547 bp, Porphyromonas gingivalis
ttcggaatatcaccttcaatgaaaaaaagttttcttttagccatagtaatgctctttggcattgccatgcagggacattctgctccggttacgaaagagcgagctttgagtctggctcggctggctttgcgacaggtatccttgcgaatgggacaaacagcagtatctgacaagatttccatcgattacgtttatcggcaaggagatgctgagaggggtatcacatcacaagaggaaggctctcctgcatatttttatgtagctaatcgtggaaataatgagggctatgctcttgtagcagcagatgacagaataccgacaattttagcctattcacccattggccgtttcgacatggacagtatgccggacaatcttcgcatgtggctacaaatttacgatcaggaaataggcctgatactttccggaaaagctcagctcaatgaagagatattacgtaccgagggcgtaccggctgaagtacatgctctgatggataacggtcattttgccaacgatcccatgcgatggaatcaaggttacccatggaacaataaggaaccactgcttcctaatggcaatcatgcctataccggctgtgttgctactgctgcagcacaaatcatgcgctaccatagctggccgcttcaaggtgaaggctctttcgattatcatgcaggttcattagttggcaactggtccggcacatttggtgaaatgtacgactggatcaatatgcccggaaatcccgaccttgataatctgactcaatctcaagtggatgcctacgccacactgatgcgtgatgtgagtgcatctgtttcgatgagtttttatgaaaatggaagtggtacgtacagcgtttatgtagtaggagccttgcgaaacaactttcgctacaagcgttcactgcagctacatgtacgcgccttatatacctcacaggagtggcacgatatgatccgcggggaacttgcctccggaaggccggtctattatgcagggaataaccagagcataggacatgctttcgtttgcgatggttatgcttcggatggtactttccatttcaactggggttggggaggtgtttccaacggcttctacaaactaacactcctctcgccgacttcgttgggtatcggaggtgagggaataggttttaccatttatcaagagatcatcaccggtatcgaaccggctaagactcccgctgaagccggtacagatgccttgccgatcttggcactgaaagacatagaagccgagtataaaagtgaatccggattgaacgtagggtattcgatatataatacaggtgaagagcaatcaaatcttgacctcggatacagattgaacaaggctgacggagaagtcatagaggtgaaaacttcatctatcaatatctcttggtacggatacggagagcatcccgagagtttctcattggcacctaatcagttgtcacaaggaatcaacaccatcaccctactttatcgtcgcacaggcaccgaacagtgggagccggtacggcatgcacagggaggatatgtcaatagcattaaagtaaatacgacagacccgaacaatgtcgtagtcacggtagataataacgaaggcaagctcagtatcgtccccaacagctttgtcgcagatctgaattcttatgaacatagtacgattacagtacagttcaatagcgacagccctgatgagatccgtacacccgtagcctttgctctatctacaggagctactgcggacgatgtaatatctttgggctgggtaatggctgaagttccgggcggtagcagcaactatccggtggtttggtctaaagacgttctcactctctcggaaggcgactatacattgtggtatagattttccatcaacaaccaaaaggatgaatggaaaaagatcggaagcgtgtcagtaaaaacaccgacagagtatacgcaccccttattcgaagtgggccataatcaaacttctacctatacgctggatatggcacacaacagagtattgcccgactttacactcaaaaatctcggattgcctttcaatggtgagttggttgttgttttccgccaaacacaatcctcatcggggtctttatgggcagctcaagaaacagtacatatcaagcaaggagaaactttcgtatataaacctgttgtcgaaggccctatacctgatggatcctatcgtgcgaccctccatgcattcgtaaacggacaacaacagttgtacctcaaggggaaaaggaactacacggtgaagatcgtcaatggtacagcggtagaagcaatagaatcgtcagaagagatcagagtattccctaatccggcacgcgattatgtggaaatatcggcaccttgcattccccaagaaacatctatcattcttttcgatctgtcaggcaagattgtcatgaagaatagtttatcagcggggcatggcagaatggatgtcagccgacttcctaatggggcctacatccttaaggtggatggatatacgacgaaaataaatatagtgcac

SEQ ID NO: 17 - DNA, 885 bp, Porphyromonas gingivalis
acgaagaaaacactgatgaaaaagctatttctctcgctcacgagtcttgtaatggtcttcgctgttgcaagttgcgatataatcgacaaggatcaaaccctcttgccggctccgaccaatgtgacacccgataatccggatgacaatccttcggagatcgacattacgcagacgcacacagaaaaatatgttttggctgaagaatttaccggccaaaaatgtctcaactgtccgaaaggtcatcgcaaactggcggctctcaaggagcaatacggtaagagattgactgttgtcggtatacatgccggccctggatctctcgtgccacctcttttccgtacagaagccggagacgcatattatagcaagttcgccaataatacccctctccctgcgctgatggtttcgcgcaaaaagttcggctcttcctacgtttatgataagagctacaaaacgtgggacgtgcctattgccgagcagatggagcaaaaggcgaagatcaatatctttgccgtggccgaatacaccgatacccaaaagatcaaggtgactgtaaagggtaaaatactggaggggaatacactcccgaagtccatggttcaggtgtatctgttggaggataagctgatcgctccgcaggtggatggcaatacgacagtcgagaattacgagcacaatcacgtgttgcgtggagccgttaatggtatttggggcgaagaatttgtgaatctcaaagattatttgtatacttacgccgttgaaccgctctcgggtatgtccttcgtagccgagaattattcgattgtggcttttgtatacgatgtgcagacgttcgaagtgtatgacgttgtgcatgtaaagatcaatccgcaatccgatggcaaa

SEQ ID NO: 18 - DNA, 690 bp, Porphyromonas gingivalis
acgaataaaaaagaagagacaatgaagaaatcaagtgtagtagcctcagttttggccgtggctctcgtgttcgccggttgcggactgaacaatatggcaaaaggcggccttatcggcgccggagtaggaggtgccattggtgccggagtaggtaacgtagccggaaatacggctgtcggtgccatcgtcggtactgcagtcggtggagcagccggtgctctcatcggaaagaagatggacaagcagaaaaaagaactggaggccgcagtacccgatgctacgattcagacagtaaatgacggagaggctattctggttactttcgatagcggtatcctctttgcgacgaactccagcactctgagtcccaactcacgcactgcgctgacgaagtttgctgcaaacatgaacaaaaaccccgacacggatattcgtatcgtaggccatacggacaataccggctccgacaagatcaacgatcctctgtctgagagacgtgcagccagcgtatattctttcctgaattctcagggtgtgagtatgtcgcgcatggcagccgaagggcgtgggagccatgaaccggttgcagacaatagcacagttgccggacgttcggccaaccgccgtgtggaggtttatatcttgccgaatgccaagatgatcgaacaagcacagcaaggtacgctgaag

SEQ ID NO: 19 - DNA, 2037 bp, Porphyromonas gingivalis
cctatcccttttcttcttaatatgtacagcggacatcataaaatccattatccttttcttatcctgttggtatgccttgcttttgctgcctgcaagagcgtgaagttgaaagatgcggagaaggcacatgatcgccaagagtataccaaggctgccgatatgtacaatacattatacaggcgtacccgacgaaagcaggtggagatgaaagcttatacggctttccgatccggtgaaaactatcgtgccgccggcagacaagccaaagctttgcgtggctatctgaatgccagacgctacgggtatccggattctgtggtactgctccgtttggcacagacttatcagcaaggaggtaactataaggaagccgaggtactcttccgtggatatctggaagcttatccgaaaagttattttgcagctatcggtttggaggggtgtctctttgcccgccagcaaaaggaatatcctacacgttaccggatacggcgagctgccgagtggaattcggcacggggcgacttcggcccggcctatgcacccgatgcttcggctctctatttcacatcgagcagaagcaaagacgacggtttggataatagcagcataacgggactgaaacccaacgacatttatatcatcaaacgagatgcacaaggacgatggggacgtcccgatagcgtgtccggaggaatcaacactccatgggatgaaggcgtgccaacgatcacgcccgatggtagtaccatatattatacgttggcgcagcaaggagccgattacgaccgtacggtacagatctattccgccgctcggagcggagaaggcggttggagcaacggttcgctcgtggacattatgcgcgattcgctccgtatggctgctcatccctctatgtcggcatccggcgattacctgtatttcgtcagcaatataggcggtagctatggcggcaaggatatttatcgtgtcaaggtgtcggatcgttcttatggttcaccggagaatttggggcctgatatcaatacgccgggggacgaaatgtttcccttcatagatggggatagtacccttttcttcgcttcggacggacacgccggtctgggaggactggatattttcaaagccacgctggactctaccggccaatggcatgtagtcaatatgggacaaccggtcaattcctctgccgatgatttcggcttggctgtggagcctaaaggcaaaaacaaagaagaagctttgccggacaacggagtcaaaggtgtattttgttccaaccgaggcgatgcacgcggatggccgcacctcttccatttcgaactgccggctatctacaccgagattcaaggttatgtgatggacagagaagaaaatcccatagccggagccactgtcaggatcgtaggcgaacgcggccccgtaggacagggattcgtgactactcgtgacgatggctcctataagatgagcgtgcagggcgatactcgctatgtaatgcttgccggagcatcgggttatttgaatcagtacgtagaactcaagaccgataccgccaagcagagtgagacctactatgtggactttttccttgcatcgcgtgagaaagccgagggcttgcaaaatattttctatgatttcgataaagctactcttcgccccgaaagcatgaagagcttggacgaactgattcgtatcctcacggacaatccggatattcggatcgaattgggttcgcatgccgacaggaaaggccccgatgcttacaacctcggactatctgaccgcagagccaaatccgtggtggattacctcacgagtcgtggcatagcggccgacaggcttacgtggaaaggctacggtaagtctgtccccaagacggtgacagccaaaattgccgaacggcacgatttcctgaaggaaggcgatgtgctcaccgaggaattcgtagcacctttgaccgaggagcagcagtcagtctgcgaccaactgaaccgtcgtaccgagttccgtgtgatcgaagaagagttgcgt

SEQ ID NO: 20 - DNA, 987 bp, Porphyromonas gingivalis
aaccttaggacacagcctttctttttggtagatttgcaatctatgatcagaacgatactttcacgatatgtatcctcgaacttttggagtcggggagctaccttttttttcacgattttcccggccttcatcctcgccgctactgctttgccggcttgtggagggggtactgcttcaggctccgatcgtacgctggctgtgaccatcgagccacagaaatacttcatcgagtccattgcggataagtcggtgcaggtggtggcattggtaccggccggcagcaatccggaggaatacgacccttcgcctaccgtgatgaagcgtttgtccgaagcagatgcctacttctatataggaggactggggttcgagcaaagaaatctcgctgccattcgggacaataaccctaagctccctcttttcgaaatgggcaaagccttggcggatgccggaagtgcagatctccacggctcctgcacagatcattctcatacagacctgcatgcccatgatccgcactattggagcagtgtggtaggggcaaaggcactcagtcgtgctgcatacgacgcgcttgtggagctttatccgaacgagaaagacaaatgggacaaagggcacgaccgtctcaacggacgtatcgacagcgtgaagagactcgtcgataccatgtttgccaatggcaaagcagacaaagccttcgtcatatatcacccatcgctcagctttttcgcccaagagttcggcctgcggcagatcgtcatagaggaagatgggaaagagcctacggctgcccaccttcgtcgtgtgatcgatcaggcacgtgccgatggtgtcagaatcgtatttatccaacccgaatttgaaacgcgtcaggcggaggacatcgcacgcgagatcggtgctcgtccggtaaggatcaatcctctgcgcagctcgtgggaggaggaaattttacatattgctcgcgctttggctcatgaacgg

SEQ ID NO: 21 - DNA, 2886 bp, Porphyromonas gingivalis
gccatttttgtcgtatcattgcaaattgaaaaaataacagagaataagtataattcagacaagagcatgaacaaattttacaaatcacttttgcagtcaggactggctgccttcgtgtcgatggcaactgcactgaccgcttctgcacagatttcgttcggaggggaacccttgagtttctcttcaagatccgccggaacgcattcattcgacgatgcaatgactatccgccttactccggatttcaatccggaagacctgatcgcacagagccgttggcaatcgcaaagagatggccggcccgtccggataggacaagtaataccggtggatgtggactttgcatccaaggcttcgcacatctcttccatcggagacgtagatgtatatcgcctgcaattcaagttggaaggagccaaagccattacgctttattacgatgcattcaatattccggagggcggacgcctctatatctatacccccgaccatgaaattgtgttgggagcatatacgaacgccactcatcgccgcaacggagcttttgccacagagccggtaccggggagtgagcttattatggattatgaagtgtctcgcggagggactttgcctgacatcaagatctccggtgcgggttatatattcgacaaagtcggcggacgccccgtaacggataaccattacgggatcggtgaggacgattccgattcggattgcgagatcaacatcaattgtcctgaaggtgcagactggcaggcagagaagaacggtgtggtgcaaatgatcatggtaaaaggacagtatatctcaatgtgctcaggcaacctgctcaataatacgaaaggagactttactccgctgatcatttctgccggacactgtgcttccataacaaccaatttcggtgtaacgcaatccgagttggataagtggatcttcactttccactatgaaaaaagaggatgcagcaatggtacattggccatcttccgtggcaacagtatcatcggagcttccatgaaggctttcctcccgatcaaaggtaaatccgatggtctcttgctgcaactcaacgatgaagtccctctgcgctatcgtgtctattacaatggatgggacagtacgcccgatattccctcgagcggtgccggtattcatcatccggccggagatgccatgaagatttccatcctaaagaagactccggctctgaatacatggatctcctccagtggttccggagggactgacgatcacttctatttcaaatacgatcaaggtggtacggaaggaggatcgtccggttcttctctcttcaatcagaataagcacgtggtcggcacactgaccggaggtgccggcaattgtggcgggacggagttctacggcagactgaacagtcattggaacgagtatgcatccgatggcaatacgagccgcatggacatctatctggatccccaaaacaatggccagacgaccatcctcaacggaacgtatcgtgacggttataagcctttgccctctgtgccccggctattgttgcagtctacaggcgatcaggtcgaattgaattggacggctgttcctgccgatcaatatccatcatcttatcaggtcgaataccacatattccgaaatggaaaggaaatagctacgacaaaggagttgtcctattcggatgccatcgacgaaagtattatcggtagcggtatcattcgatacgaagtaagcgcacgcttcatttatccctcgccgttggatggagtggaatcttataaggatacggacaagacttctgccgaccttgccataggagacattcagaccaagctgaagccggacgtaacacctctccccggaggaggagtatcattaagctggaaagttcctttcttaagccagttggtttcccgattcggagaaagccccaatcctgtgttcaaaacctttgaagtgccctatgtttctgccgcagccgcacaaacccccaatcctcccgttggcgtagtcattgcagacaagtttatggccggtacatatcccgaaaaggctgctatcgctgccgtttatgtaatgccatccgctccggactctactttccacctcttcctcaagagcaacacaaacagaagattgcagaaggtgacaactccctccgattggcaggccggaacatggttgaggatcaatttggataagccgttcccggtgaataatgaccatatgctttttgccggtatcagaatgcctaataagtacaagctcaatcgtgctatccgttatgtaagaaatccggataaccttttctccattaccggtaagaagatttcatataacaacggagtctctttcgaaggctacggaataccctcgctcttgggctatatggctatcaaatatctggtggtaaataccgatgctccgaagatcgatatgtcgcttgtacaggagccttatgctaagggaacgaatgtggctccattccccgaattggtcggcatatatgtctataagaacggaacatttatcggcacacaggatccatccgtcacaacttattcggtttcagacggaacagagagcgatgaatacgaaataaaactggtatataagggatcgggcatttcgaatggcgttgctcagattgagaataacaatgctgtcgttgcatatccgtctgttgtaacagatcgtttcagcattaagaacgctcatatggttcacgctgccgccctctactcattggatggcaagcaggttcgttcttggaacaacctccgcaatggcgtgacattcagtgttcaaggacttacggccggtacttatatgctcgttatgcagacggcaaacggccctgtgagccaaaagatcgtgaagcag

SEQ ID NO: 22 - DNA, 2814 bp, Porphyromonas gingivalis
tcagaaaattatagatacggaaaaattacgaatcaaataatggctatcatgatgaaaagtattgtttttagagcatttctaacgattttgctctcgtgggcagcgatcacgaatccgactgctcaagagatctcaggcatgaatgcatcctgtctggctgctccggctcaaccggatactatcttatatgaaagttttgagaatggacctgttcccaatggctggcttgagatagatgctgatgctgatggtgccacttggggaagcccatcaggctctttctctgtaccttacggacacaatggcctttgcacctactcccatatacgttccggtatctcaacagcgggcaactatctgattacacccaatatagaaggagccaaacgggtcaagtactgggtatgcaatcagtatagtaccaatccggaacattacgcagtaatggtatcgacaacggggactgccattgaagactttgttttgttgtttgatgattccataacagggaaaccgactcctcttgtatggcgtagacgaatcgtggacttaccggaagggaccaaatatattgcatggcgacattacaaagtcaccgactcacacacagaattcttgaaattggatgatgtcactgtgtataggtcgatcgaagggcccgaacctgctaccgacttcacagtaatcaatattggtcagaatgtgggacgattgacttggaactatccggaggattatcaaccggaaggaaaggggaatgaagagttgcagcttagcggctacaacatctatgcgaacggtacactactggcacaaataaaagatgtctccatactggagtatgtggacagcacttactctttgcgagacaatcccttgcaagtggagtactgcgttacagccgtttacgatgaaagcatagaatcttcgaccgtatgtggcacgctgcattacgccacggatgccatcctttatgaaaattttgagaatggacctgttcccaatggttggcttgtgatagacgctgatggagatggatttagctggggacactatttgaatgcatacgacgcttttcccggccataatggaggccattgctccttgtcggcttcttatgttccgggtataggcccggtgactcccgacaactatctgattacccccaaggttgaaggagccaaacgtgtcaagtactgggtaagcacgcaggatgccaattgggcagcggaacattacgcggtgatggcttcgacaacggggactgctgtcggagatttcgtcatattgttcgaagaaaccatgacagcgaagccgaccggcgcatggtatgaaagaaccatcaacttacctgaagggactaaatacatcgcatggcggcattacaactgtaccgatatatatttcttgaagttggacgatatcactgtattcgggactcctgcatcagagcccgaacctgttaccgatttcgttgtctcgcttattgaaaacaacaagggacgattaaagtggaattatcctaacggctacgaacccgataagactgatgataaagacccattgcagcttgccggctacaatatctatgcaaacggctcgctccttgttcacatacaagacccgactgttttggagtatatcgatgagacttattcttcacgagacgatcaggtggaagtggaatattgtgtcactgccgtttataacgacaatatcgagtcccaatcggtttgcgataagctgatttatgattctcaatcggacattatcttatatgaaggctttgaggccggaagtattcctgaaggctggttgttgattgatgctgatggcgacaatgttaattgggactattatccttggactatgtatggacatgacagtgagaagtgtattgcatccccttcgtacttaccgatgattggcgttttaactccggataactatttggttacacccagactcgaaggagccaagcttgtcaagtattgggtaagtgcgcaagatgctgtttattcggctgagcattatgctgtgatggtttctactacgggaactgctgttgaagattttgtcctcttgttcgaagagacaatgaccgctaaggctaacggtgcatggtatgagcgaactattacattgcctgcaggaacaaaatatattgcctggcggcattatgattgcaccgatatgtttttcttgctcttggatgacattacggtttatcgttctactgagactgttcccgagcctgttactgatttcgttgtctcgcttattgagaataacaagggtcgcctgaaatggaattatcctaacggctacgaacccgataagactgatgataaaaaaccattgcagcttaccggctacaacatctatgcaaatggctcgctccttgttcacatacaagacccgactgttttggagtatatcgatgagacttattcttcacgagacggtcaggtggaaatggaatattgtgtcactgccgtttataacgacaatatcgagtcccaatcggtttgcgataagctgaactatactatcacatccttggataatattcaatctgatacaagcttgaaaatatatcctaatccggcatcgtatgtggtaaggatagagggattgagtcggagcaagtcgacaatcgagttgtataatgcgctgggaatttgcatattaagggaagagactcattcagagaaaacggaaatcgatgtttcacgtctcaatgacggagtctacttgattaaagtagtcggtggaaataaaacaacaaccgaaaaggtagagataaagaggccg

SEQ ID NO: 23 - DNA, 1011 bp, Porphyromonas gingivalis
cctcagcccgtcggccttaaagaaataaccattaaacccatgtgcctcgaacccataattgctccgatttcatccgagttgctcgagcaggagctgactgccgatcgttttctgcggatgacaaacaaagccggcaatgagatctatgtttttacggccgaagaagctccgcattgcatgaaagaagtaggccgactgcgagaagaagcctttcggcattatggcggaggtactggcaaggcgatcgatatagacgagttcgacaccatgcccgggagctacaaacagctgatcgtatgggatccgcaaaacaaggctatactcggaggctaccgctttatctatgggcgggacgttgctttcgataccgatggcaagcctttgctggcaacggcagagatgtttcgcttcagtgatgcttttttgcacgattatctcccctacacagtcgaattgggacgttcgttcgtgtcgctccagtaccaatcgacacggatgggcacaaaggccatttttgtgctggacaatctttgggacggtatcggagcactcactgtagtcaatccagaggcactctatttctatggcaaggtgaccatgtacaaagactatgatcggcgagctcgcaatctgatcctgtattttcttcgcaagcacttctccgatccggaaggcttggtcaagcctattcatcccctaccgatagagatcagtgcggaggacgaagccttgttctcctcatccgactttgacaccaattacaagactctcaatatagaagtgcgcaagctgggtatcaatatccctcctctcgtgagtgcatatatagctttgtctccggagatgcgtgttttcggcactgcagtgaatgagtctttcggagaggtggaggaaaccggcatattcattgctgtgggtaagatcctggaagagaaaaaacaacggcacatagagagcttcatcctcagccggaacgaaaaaaaaggtctcgacagtagcaatggccgatca

SEQ ID NO: 24 - DNA, 3753 bp, Porphyromonas gingivalis
  misc_feature (3024)..(3024): n is a, c, g, or t
aaatggaaattggcatgcgcttttgattgcgcgtgttgtttcgatccatttgtagtaactaacgaggtaataataatgatgaaacgatatacaataattcttgcagtttttcttttattctgcacggtatttacctttcaaataaaagctcgcccttatgaaagatttgcagatgtagagaagccttggattcagaaacattcaatggattctaaattggtgcctgcaaataagggtaacttaattcaagctgaaattgtataccaatctgtttctgaacatagtgacttagttatttcacctgtgaacgaaataaggcctgcaaatcgtttcccttcgcataggaagtctttttttgcagaaaatctacgggcatctccccccgtagttcccgttgccgtcgacaagtatgcggtaccggttgccaatccaatggatcctgaaaatcccaatgcctgggatgtgacgctaaaaatcactactaaagcggtaacagtacctgtcgatgtggtgatggttatcgaccagtcttcgtcaatgggagggcaaaacattgccagattaaagtctgccattgcatcgggacagcgttttgtgaaaaaaatgttgcctaaggggacggctacagaaggggtgcgtatcgctcttgtgagttatgaccatgagcctcatcgcttatctgattttaccaaagacactgcttttctctgtcaaaaaatccgggctttgactcctatttggggaacacatacccagggggggcttaaaatggcgagaaacattatggccacttctactgctgtggataagcatatcatattgatgtctgacgggttagcgacggagcagtatcctgttaaaaatgtaactactgcagacttcattggcaaaactggaaatgcgaatgatcccattgatttggttatacaaggagcaattaatttccctacaaattatgtttccaacaatccatctacacctcttaccccaaattatccaactcattcttctaaagttggacggagaaatctgccggaatccaaattcgattatagtaatctgagtgcaaggattacttttgatggtgttgctggcgcattggtctatgaaccgaggtttcctcatccctattattattatttcccttgtaacgctgctatcaatgaggctcagtttgcgaaaaactctggttatacaatccatactattggctatgacctgggagattttgccttggccaacaattcgttgaaactaaccgctacagacgagaatcacttctttacggcgacaccggccaatttagctgcagcgtttgataatattgcccaaactattaatataggtatacagaggggggaggtgacggactttgtagctcctggtttcatcgttaaaaatctgacgcaatcgggagatgttactcatttgctaaatgtttcaaatggaacggtgcactatgatgtctctactaaaaaactgacatggactactggtactatcctgagctcatcagaagctaccataacttatcgtatttatgccgatttggattatatacagaacaatgatattccggtaaatactacttctgctatcggcccggatcttggtggattcgataccaataccgaggcaaaattgacctataccaattccaatggcgaaccgaatcagcagttaattttcccacgtccgacggttaagttaggttatggtgttattaagcggcactatgtattggtaaataaagacggtcaacccatacaggcaaatggaacagttgtcagttccctaagcgaggctcatgttctacagtcacaagatttctttttgccctcaggtggaggtcatattgttcccaaatggataaagttggacaaaacgaccgaagcattacagtactattccgtaccgccgactaacacggtcatcactactgccgatggtaaacgttatcgttttgtcgaagtcccaggctccacgccgaatccgggccaaatcggtatcagttggaaaaaaccggcaggaaacgcttacttcgcttacaagctcctcaattattggatgggaggaacaacagaccaacagagtgaatgggatgtgacgtccaattggacaggagcccaagtaccgctcacaggagaagatgtagagtttgcaacgacagaaaatttcggttctccggcggtagccgatttgcatgtcccgacaaccaaccccaaaattatcggtaaccttatcaataattccgacaaggatttagttgttaccacaagcagtcaattgacgatcaacggcgtggttgaggataacaatccgaatgtcggtacgatcgtcgtgaagtcgtcgaaagacaatcctacggggacattgctttttgccaatccgggctataatcaaaatgtaggggggaccgtcgagttttacaatcagggatatgattgtgccgattgtggtatgtatcgcaggagctggcagtatttcggtatccctgtcaatgaatcaggttttccaattaatgatgtgggcggaaacgagaccgtcaaccaatgggttgagcctttcaatggcgataagtggcggccagcaccttatgcacctgatacagagcttcaaaaattcaagggctaccagatcacgaatgacgtgcaggcacagcctacgggagtttacagcttcaagggtatgatttgtgtgtgcgatgccttcctgaatctgacacgcacgtccggtgtcaactactcgggcgccaacttgatcggcaactcatacactggagccatcgacatcaagcagggtattgtcttcccgccggaagtcgagcagacggtgtatctgttcaacacgggaacacgcgaccagtggcgtaagcttaatggaagcacggtttcaggctatcgagccggtcagtacctctctgtacctaagaatacagcgggtcaggacaatcttccggatcgtattccatcgatgcattccttcttggtgaagatgcagaacggagcgtcttgtacgttgcanatcttgtacgataagctgctcaagaacacgactgtaaacaacggtaatggtacgcagatcacatggcgatccggcaactccggatcggcgaatatgccgtcacttgtgatggatgttcttggtaacgagtcggccgaccgtttgtggatctttaccgatgggggtctttctttcggattcgacaacggctgggatggtcgcaagctgactgaaaaaggtttgtcacaactttatgcgatgtctgacatcggtaatgataaattccaggttgcaggggttccggagttgaataacctgctgatcggcttcgatgcggataaggatggtcaatacacgttggagtttgctctttcggatcattttgcgaaaggggctgtttacctgcacgatcttcagtcaggagccaaacaccgtattacgaattctacgtcgtattcattcgatgccaagcggggagattccggggctcgtttccgcttgtcatatggatgtgatgagaacgtagatgattcgcatgtcgtgagtacaaatggccgtgaaattataattctgaatcaagatgctcttgactgcactgtaaccttattcacaatagaaggtaagcttcttcgccgcttgaaagtattagctggtcatagagaagtcatgaaagtgcagaccggaggggcctatattgtgcatcttcaaaatgctttcactaatgatgtgcataaggtgcttgttgagtat

SEQ ID NO: 25 - DNA, 1218 bp, Porphyromonas gingivalis
atattcatagaccccgataagaatacaaaacaaaacgaacgaaatatgattatcaagaaaatgctgaaaaataaattggcccccttggccatactgttcctttttgctccaaaggctatgaaggctcaggagcaactgaatgtggtacacacctctgtgccatcgctgaatatcagtccggatgcacgtgcggccggtatgggggatataggtgtggcaacgacgccggatgcgtattcacagtattggaatccgagtaaatatgctttcatggatacgaaagccggtattagcttctcatatacaccctggctgtccaagctggtcaatgatattgccctgatgcagatgaccggtttctacaaattgggaacagacgagaatcaggctattagtgcttctctgcgttatttcacattaggaaagttggagactttcgacgaattgggcgaatccatgggagaggcccatcccaatgaatttgctgtcgatttgggctatagccgccagttgtcggagaacttctccatggctgttgcactgcgttacatccgctcagaccaaagcactcacaacaccggagagaatcaggccggaaatgcctttgcggcggatatagccggttatttgcagaagtatgtgctactgggtaatgcggagagcttgtggtcgttgggtttcaacgtaaagaatatcggaacgaagatctcctatgacggaggtgtcacgagttttttcatccctacttcgttgaatctcgggacggggctgttgtatccgatcgatgactataacagcatcaatttcaaccttgaacttagcaagctgcttgtacccactcctcctatcatggatcaaaacgatcaggccgggtatgaggctgcactcaagaaatatcaggaaacttcttcgatcagcggtatattctcttctttcggtgatgcgccgggaggactcaaggaagaattccgtgagattacatggggacttggggctgaatatagctatgacgataaattttttgttcgtgccggatattcatacctgcaccccaccaaaggcaatttgcagtacttcacggccggtgccggcttcaaaatgaacatattccgtatcgatgcttcctacctgttgtctacgatccagagtaatccgttggatcagactctgcggtttacgcttgctttcgatatggatggattgcgcaatttgttccac

SEQ ID NO: 26 - DNA, 1356 bp, Porphyromonas gingivalis
ctaataatcgaaaaggaaatgaaaacaacagttcaacaaattattctgtgcctggctttaatgatgtcaggtgtattgggcggaaacgcacagagcttttgggaagaaatagctcctccttttatcagtaatgagcctaacgtcaagtatataattcccaatatggggattgattcaaagggaacaatctatgtaaccgtgacaaaaaggattcagcagggagcaaattatacttctgagcaattgggtatgtactatcgaccattaggtgataatgaacagtggtggaaacatgatccgtattttgatgacaagatagttgcggatattcagacagatgcatatggcagagtttatgtatgtacgacttcttctcgagatcaagagtatcaactttatataaacgagcagaacgaatggaggtgtatattcaaaacttctgtgtctacatatgagcatggtatggctgtttttcgctcttcgacaggggtgacttatataggtaccaggcatcacatcttcgcatcaggtgtaaatgatttcgagttcaacactatctatgaagactctacacctatgagctgtcgctttgcagaggctacgaatagtggcaccatctatctggcattgatgcatgaaaccacaatgtctacgactatccttacttatcaaaacggtgagttcgtcgatatctcggaaagtgaattgagtaactcgattattgcatccatgtgctctaataaagaaggtgatataatagctcttgttacttcatatacaggatttatgagtggaacccttgcgatcagaaaagcagatgaaggcaaatggcaacttgttggcggagatatacagaatgcgatcgttcaaaatatatgcatgatggacgacaacaagattgcttgtgaagtcttcgggactcctaacggagtagatggtcggacaagggtttgtgtttctgacgcatctgtctttgattttgagtggtatgaagatgaaatatacggaggcctgatatttgacactttcttctatagcccttgggacaaacttctttatgcgaaatttggtgggattatgctcaggagtaaagagtcttttataacctctttcatttctccgacagttgtacaaggagtggatgtctatactttggccgggaagataaggatcgaaagtgaaactccggtgtctgaggtgttgcttttcgacctggctggcaggatggtacttcggcaaaccattgataataaaatctattcggacatagatactaacggactaaagcgaagcggtatttacgtagtctcggtgcggctctcttccggacaggtattcagtcataaggtgcaggta

SEQ ID NO: 27 - DNA, 1842 bp, Porphyromonas gingivalis
ccatataatgtccaatctattagcaacaagacgattaaaaaacaaatggaaaacttaaagaacattcagcccagagaggatttcaactgggaagagtttgaggccggtggcgtccatgctgccgtgagtcgtcaggagcaggaagctgcttatgacaaaacgctcaataccatcaaggaaaaggaagtggtaatgggtagggtaactgctatcaacaagcgtgaagtggttatcaatgtagggtacaaatcggaaggtgtggtacctgcaacagaattccgctacaatcccgaactcaaagtgggagacgaagtggaagtttatatcgagaatcaggaagataagaagggccagctcgtcttgtctcaccgcaagggtcgtgccgctcgctcttgggagcgcgtgaacgaggctctcgaaaaagacgaaatcgtaaagggctatgtgaagtgtcgtaccaagggtggtatgatcgtcgatgtattcggtatcgaggctttcctcccgggatcacagatcgacgtgcgccccattcgcgactacgatgcattcgttgagaagacgatggagttcaagattgtgaaaatcaatcaagaatataagaatgtagttgtttcccacaaggtgctcatcgaagcagagctcgaacaacagaagaaagaaatcatcggcaagctcgaaaaagggcaggtactcgaaggtatcgtcaagaatattacttcttacggagtatttatcgacctcggtggagtggatggtcttatccatatcactgacctttcatggggtcgtgtggctcatccggaagaaatcgtacagctggatcagaagatcaatgtcgttatcctcgactttgatgaagatcgcaagcgtatcgctctcggactcaaacagctgatgcctcatccttgggatgctctcgacagcgagcttaaggtaggcgataaggtgaagggtaaagttgtggtgatggcagattacggtgctttcgttgagattgcacagggcgttgagggtcttatccacgtaagcgaaatgtcatggacacagcacttgcgttctgctcaggacttcctgcatgtaggcgacgaagtggaagccgtgatcctgacgctcgaccgcgaagaacgcaaaatgtcgctcggtctgaagcaactcaagccggatccttgggctgatatcgaaactcgtttccctgtaggctctcgtcaccatgctcgtgttcgcaacttcaccaatttcggtgtattcgttgagatcgaagagggcgtagatggccttatccatatttccgacctttcttggacgaagaagatcaaacaccccagcgagtttacggaagtaggtgctgatatcgaagttcaggtaatcgagatcgacaaggaaaaccgtcgtctcagcttgggtcacaaacagttggaagagaatccttgggatgtattcgagacggtattcactgtaggatctatccacgaaggaacggtaatcgaagtgatggacaagggtgctgtcgtttctctgccttacggtgtggaaggttttgccactccgaagcacatggtgaaggaagatggctcacaggctgtactcgaagagaagttacctttcaaggttattgagttcaataaggatgccaagcgaatcattgtatctcatagccgtgtattcgaagatgagcagaaaatggctcagcgtgaagccaatgcagagcgtaaggctgaagccaaagcggctcagaaagaagctgctgccgaagctgccaatcctgcacaggctgtagagaaagccactctcggagacctcggcgagctggccgctttgaaagaaaagctttcagaaaac

SEQ ID NO: 28 - DNA, 1689 bp, Porphyromonas gingivalis
tcgctaatcaacaattcaagagactggagggctcctgtccgattgagtctcaaaaaaaagacaaaaactatgaagacaaaagttttacgcaaattcgtggtggcggctttcgccgtcgcaaccctctgtcctctcgcccaagcgcagacgatgggaggagatgatgtcaaggtggtccagtacaatcaggaaaaactggtacaaacgaggatgagtgtggcggacaacggatggatctatgtaatgacccacagtggatacgacaccggcaatagcaatgtgaagatcttccgctccaaagaccaaggtgccacataccaaaagttgagggattgggatccatcggatgattatcagtttcaagacttcgatatcgtggtaacgggtaagaatgaatccgacatcaagatttggtcggtagagctcatgaataagcccggaggatataagagtagagttgcggtcttcagtcgcgatgccaacgcgcagaatgcgaaactcgtgtataaggaagacttctccaatgtgcagttgtacgatgtggatatagcctccaactatcgttcgccttcttctcttaacaatggtggcaacccttttgctttggctttcgcttacaccggcttcaacaatacgcacaaaataagttttgtggactatgtgttctctctgaatggagggcaaaatttcaataaaaacttactcttcagtcaagatggagagaagaaaattgacaaggtggatctctcattgggtagcacctctgaatccatgggtcacaatgcctggccgctaatgggtgtggtattcgaaatgaataaacaagggggaaaaagcgatatcggtttcttgtcgaactttgtcgacaatgatcccgaatttcagtggtcaggccctataaaagtgagtgaaagcgacatgtcgttcagccccaaaatccaaatgttgctggacgaggataacaatacgatcaatggggagagttgccacaacttcatgattacgtacagcgattatgattctgaatattcggattgggacattcggtatgtatatcccaagaaatcgttcaagtatgaaaaaggaaaaactccgactatggatgatctggtggaagctttccttacagcttcgtaccagagtgagaccaactcggggctggggtatgacaagaacgccaatcactacctgattacatatgccaaaaaagaagagaacggtacgaacacgctgaaataccgctgggccaattatgacaagattcataacaaagatttgtggagcgacacatttacgtatacatcatctgccaatgctctctacacacctcaagtagacatcaatccgaccaagggtctcgtgtgctggtcatgggtggaatatctgccgggcaaacggatcgtttggtctgatacgcagtggacccatgccaacggtgtagaagacatcgtaatgcaagaaggcagcatgaagctctacccgaatccggctcaagaatatgctgtgattagcctgccgacggcagcaaactgcaaggctgttgtttacgatatgcagggcagagtagtcgctgaggcttctttctccggcaacgaatacaggctgaacgtgcagcacttggctaagggtacgtacatactcaaggtcgtatccgatacggagcgtttcgtagagaagctcatcgtggaa

SEQ ID NO: 29 - DNA, 3486 bp, Porphyromonas gingivalis
gctatttctcagatgaaacgaatacttccaatagtcgcattcctttctctcttccttgcccttgctttgcctgcgaaagcgcaacgagctatggggaagacggccgaccgttcgctaatggcttcgggacattgggtcaagatacgtgtcgatgcaagtggagtgtatcgccttacggacgaacagctccgtgccaatggcttctccgatccgtccaaggtaggtgtgttcggttatggtggaggggtgcttcccgaagatctgagccggatcacgacagacgatttgcctccggtaccggtactccgtcagggcaatgcgctgtatttctatgccgtgggcccggtgacatggttctacaatccggccaaaaccaccatggagcatacggtgaatacatacagtacgcatggctactacttcctgtcggatgctgccggagcacctttgcagatgtcccaatatacgggtggaggtgcgtcggccgaggctttgatcgactactacgatgagctgatgctccatgaacaggaattgtattcgcccaaagaatcgggacgagatctgtatggcgagtctttcagtgcagtcaatacgcgtacggtcaagttccctttgaggggcaacacccgctcgtctggcgaactcggtaccgtattctcatacatagccaaggccagatcggccggtggcggccgtgagatgtcgctctcggcgaatggcattctgatcttcagcgatcctttttccatgacatcgaatgaagtctccaattcctatttggccggcaagaagcgtcgtctctatcacagtacgccgatgaacagcttggtcaatgagttgcgcttggacgcgaactatagcatgacaggagatgcggtcaatctggatttcatagaggtggctacacagaacgacctccggtacgatggcgcacccatgcatatcaggcggttttccaatttgcccgttttggggggcgagtcctgccggttcgttatcagtgaggtgccggagtctctggtggttttgcaggccaattcttccctgacagcatcgcttgttcccgttaagactgtcggggataagaccattgagttcgtggctccgccgaagggtcaggatcgtaggactatcaatacgttttatgccgtggacttgtcacaggcttctgctccggagatcctcggagcggtacccaatcaaaacctgcatggagaggaaatccctgatctgatcattgtctctactcaggcgctcctccttgaggctgatcgactggccacctatcgtagagagaaaaacgggctgaaggttttggtcgtgttgcaggaacaggtgttcaacgagttttcgggtggaactcccgatgctacagcataccgcctctttgccaaaatgttctacgacagatggaaggcaaatgcacctgtgggagagaccttcccgatgcaaatgcttctcttcggtgatggggctcatgacaacaggaaggtctccgtagcttggcagaaaccgtatctccaacaaacggagttcttgctgacattccaagccgtcaattcgacgaacgtaaacagttatgtgacggatgattacttcggcttgctggatgatcagccggcctcggtcaatatcggttggcgcaattataatatggctgtagggcgattccccgtacgtactccggccgaagctcgcatcgcagtggacaagaccatccgatatgaggaggatcgagagagtggtgcctggcgtattcgtgcctgttttgcggcagacaacggggacaagcacgcaaccgagacttcccgtttgatcgataccgtcaagcgttatgctcctgccatcatgccggtacgcgcctttcaggacgtatatccgcatgtcatcgagaacgggttgcacagcattccgggtgcaaagaaaaagatgctggaaacccttcagtcgggtattatcctgcttaattatgctggtcatggcggtcctgccggatggtcggacgagcatttgctgacgctcaacgatatacacaaattcaattataagcatatgcccatttggattactgccacgtgcgactttgccaactatgacagtcagacgacctcggcaggggaggaggttttcctccatgagaagagtggcactccgatcatgttctcgactacgcgtgtcgtttacaatacgcagaatgagaagatcaatggttttatgcttcggcgtatgttcgagaaagctaaggatgggcgttatcgtacgatgggcgagattatccgatcggccaaacaggggatgctcagtactgttttccccgattcgatcaaccagttgagtttctttctgatgggtgatccgtccgtgcgtatgaatcttcctacccacaaagtgcaattgaccgcaatcaacgggcaggatcccgaagggcagtatggaactattatgctcaagtctttggaacgggtagctctgaagggtaaggtaaccgatgaaaaggggacattcgacgagacattcagtggcaaggttttcctgaccgtcttcgatggcagaaagaaaatgacagctttggaagaggagggaaacgatctctctcttgtatattatgactatcctaacgtgatgtatgccggtattgccgaggtgaaagacggactcttcgaaacttcgtttatcgtacccaaggatgtgaactattccgagcacgaaggccggatcaatctttatgcttataacgagagcacaaaggcggaagccatgggggtagacttctccatcagagtccaaccgggtattcctgatgaggtaacggaagataatacaccgcctgaaatcataagctgcttcctcaatgacagtacattccgatcgggagatgaggttaatcctactcctctgtttatggccgaagtattcgacttgaatggaatcaatatcacgggtagcggagtagggcatgatattacgctttgtatcgatggccgtgccgacctgacctacaacctcaatgcatatttcacaagttcggctacggatgcaggtgtgggcactattctcttcatgataccggctttggccgaaggagatcatactgcccgactgacggtttgggacattttcaataatgccgtccatcatgacttttcattcagagtggtagatggcattgctccggatgtggctgatgtgattctattcccgaatccggtacgcgagagtgctacgttccgaatcttccacaatcgccccggaagcgatttgaacgtggccgtggagatctatgacttcaccggtcgtcttgtgaacagtttgccagtcaagacctattcgtcttcctacggagaacctatagagatcaagtgggatctgacctccaaatacggagtgaagatcggaaacggattctacctctatcgttgtgtggtgaactctcccggaggacagacggcctccatggccaagaaaatgatcgtggtaggacaa

SEQ ID NO: 30 - DNA, 1689 bp, Porphyromonas gingivalis
catcataaaacatatcaaacaatgaaaaagcttttacaggctaaagccttgattctggcattgggactcttccaactgcccgcaatcgcccaaacgcaaatgcaagcagaccgaacaaacggtcaatttgcaacagaagagatgcaacgagcattccaggaaacgaatccccctgcaggtcctgtgcgtgctatcgctgagtacgaacgctctgcagccgttttggtacgctacccgttcggtatcccgatggaattgatcaaagagctggccaagaacgacaaggtgattaccattgtggcgagtgaaagccaaaaaaacaccgttataacccagtacacccaaagcggtgtgaatctctctaattgcgatttcatcattgcgaaaactgactcttactggacacgcgactataccggttggttcgcaatgtacgatacgaacaaagtaggtctcgtggactttatttataaccgccctcgtcctaacgatgatgaattccccaaatacgaagcacaatatctgggcatcgagatgttcgggatgaagctcaagcagaccggtggcaactacatgacggacggatatggatccgctgtgcagtcacatatcgcatatacggagaactcctctctgtctcaagctcaagtaaatcaaaagatgaaagactatctcggcatcacacatcatgatgtggtacaagatccgaacggcgaatatatcaaccatgtggactgttggggcaagtatttggcaccgaacaaaatcctcatcaggaaagtgcctgacaatcaccctcagcaccaagccctggaagatatggcagcctacttcgcagcacagacctgcgcatggggaacgaagtacgaggtatatcgcgctttggccaccaatgaacaaccgtacacgaactctctgattctgaacaacagggtatttgttcctgtcaatggccccgcctccgtggacaacgatgctctgaacgtctataagacggcaatgcccggttacgaaattataggtgtcaaaggggcttcaggaacaccttggttaggaacagatgccctgcattgtcgtactcacgaggtagcggataagggctatctctatatcaagcactacccgatactgggcgaacaggcaggccctgattataagatcgaagcagatgtcgtctcatgcgccaatgctactatctcgccggtacaatgttactatcgtatcaatggttccggtagctttaaggctgctgatatgacgatggaatcaacaggtcactatacttatagctttacaggtcttaacaagaatgataaggtagaatactatatctctgccgctgacaatagtggtcgcaaagagacttatccctttatcggcgaacctgatcctttcaagtttacgtgtatgaacgaaaccaatacatgtactgtgaccggagctgccaaagctcttcgtgcatggttcaacgccggtcgttcagaactggctgtttcggtaagtttgaatattgccggcacatatcggataaagctttataacaccgcaggagaagaagtcgctgcaatgaccaaggaattagtagcagggacgagtgtcttcagtatggatgtgtattctcaggctccgggcacatatgttctggttgttgaaggaaatggaatccgtgagacaatgaaaattctcaaa

SEQ ID NO: 31 - DNA, 1311 bp, Porphyromonas gingivalis
accacaaatagaaaaccaaatactaatatgaaactttcatctaagaaaatcttagcaatcattgcattgctgacgatgggacatgctgtgcaggcacagtttgttccggctcccaccacagggattcgcatgtctgtcactacaaccaaggccgtaggcgaaaaaatcgaattgttggttcattccatagagaagaaaggcatctggatcgatctcaatggggatgccacttaccaacaaggagaggaaataaccgtattcgatgaggcataccacgaatacacgatcgggacgcaaaccctcactatctatggtaatacgacccgattgggctgtcgatctaccggtgcaacggctgtcgatgtaacgaaaaaccctaatctgacctatctcgcatgcccgaaaaataatctgaaatcattggacttgacgcaaaacccaaagctgctgcgagtttggtgcgactctaacgaaatagaaagtttggacctgagtggcaatccggctttgatcatcctcggctgtgacaggaataagctgactgagctgaagaccgataacaaccccaagttggcctctctttggtgttctgataataacctgacggagttggaactcagtgccaatcctcgtctcaatgatctttggtgcttcggtaatcggatcacgaaactcgatctgagtgccaatcctctattggtaacactttggtgcagtgacaatgagctttcgaccttggatctttccaagaattcggacgttgcttacctttggtgttcatcgaacaaacttacatccttgaatctgtcgggggtgaagggactgagtgttttggtttgtcattccaatcagatcgcaggtgaagaaatgacgaaagtggtgaatgctttgcccacactatctcccggcgcaggcgctcagagcaagttcgtcgttgtagacctcaaggacactgatgagaagaatatctgtaccgtaaaggatgtggaaaaagctaaaagtaagaactggcgagtatttgacttcaacggtgattctgacaatatgcttccatacgaaggaagtccgacatcgaacttggcagtagatgctcccactgtcaggatatatcccaatccggtaggaagatatgcgctcgtcgagatccccgagtctcttttagggcaggaagctgctttatacgatatgaatggggtaaaagtctatagtttcgcggtagagtctcttcgtcagaacattgacctgacacatcttcccgacggcacttatttcttccgtctcgataactataccactaagctcatcaaacag

SEQ ID NO: 32 - DNA, 954 bp, Porphyromonas gingivalis
aatcatttgaagacaaatatcaagatgagaaaaacaataattttctgcttgttgctcgccctatttggctgttcttgggcacaagaaagagtcgatgaaaaagtattctccgcaggaacaagtatttttaggggcatccttgaaaaggtgaaagcaccgcttatgtatggagatcgtgaggtatggggtatggctcgtgcgagcgaggatttcttttttatacttcccgttacggatgacctcactcccgtgcttttctataaccgtcttacaaacgaaccctgctttgtgtcagaccaaggaataactgagtatttcaaattcgctcaagaaggtgattacattgaagtcgaaggaagctctgtattcatggcgaatcttttgtactatcgttttttcccgacaagaattacctcctataatgctcccattgaaggtgttgtgagcaagacgggaaatcctgcttttacaatcccgatgctcccgggggtttctgattgcatagaaatctcaaacaaccgcaaagtctttctgaccaatcaattaggggttgtaaacatcactgacgggatggaacctccgattattgccggagtctctgcttcctatggatcttccgtccgggtgtatggtcatgtctcacagcggtgggacatcataggccattgctatttggatatctacccaaccaattgctatccgctcagcacgaaacccgttgcaggagacgatgaggtttttgtcaaacaacaaggcaggcaaatagagatcgatagcaacagccccatagtccaagtggtcgtatacgatcttgaggggaaaagtgtttttcgcaaaagaatgaccgaaaacgcttataccctatcctttagagcacccatgctcggctttatgaccatcatgatcgaaacacaaaattcgattatcaataaaaaacttaatgttacacagcta

SEQ ID NO: 33 - DNA, 1383 bp, Porphyromonas gingivalis
agacgggcagttaaaatccgatcacctccccatatccactcattatttgtacgtaaatgtcttttttcagactttaaatacttatatttatcccgaaaaattacccaagagagattgggtcgattgtcgatccgtcttaagtcatacaatccaataatcattattgaaatgaaaaaaacaaccattatttctttgattgtcttcggtgctttctttgcagccgtgggccaaaccaaggacaattcttcttacaaacctttttcgaaagaagatattgccggaggagtttactctctcccgactcaaaatcgtgcgcagaaggacaatgccgagtggcttcttacagcgaccgtctccacaaaccagtctgcagatactcactttatcttcgatgagaacaaccgctatatcgctcgtgacataaaagccaatggggtaagaaaatccacggactccatttactacgatgccaacgggcgaatatcgcatgtggatctttatatctcgttcagtggcggagagcctgcactcgacacccgattcaagtacacctatgatgacgagggaaagatgaccgtgagggaagtattcatgctggtaatggatccgaatacacctatctcacgcttggaatatcattatgatgcacagggcagactgacccactggatttcttttgctttcggggcagaatcccaaaagaatacgtatcactataatgaaaaaggtctgttggtcagcgaagtgctgagcaatgcaatggggacaacctattcagacaccggcaaaacggaatacagctatgacgatgcagataatatggtgaaggccgagtacttcgtcgtccagcaaggaaaggcatggcaagtactcaaaagagaggaatacacctatgaggacaatatctgcatacaatatttggctattaacggtaccgacacaaaggtgtacaagcgagacatcgagagcgataagtccatctccgcaaatgtcattgacattccgtcaatgccggaacagacctggcctaatatgtacggattcaacgcaaagcgactgaaagagacttattcctcctacgaaggagatgtggctactcctatattcgactatatctatacgtacaaggctcttacctcaatggcaacaccttcgacagaagctcaggtagcagtctatctcaatccgtcaacggaccggttagtgattctggccaacggcatcacacatctgagcatgtacgacttgcagggtaagcttatccgtgattgtgccttgagcggcgataaggtggaaatgggtgtcggatctttgaccaaagggacatacctgcttaaagtgaatacggatcagggagcctttgtgagaaaagtcgtgattcga

SEQ ID NO: 34 - DNA, 1353 bp, Porphyromonas gingivalis
atggcaaaagttataaaaacaaaaaaaggccttgcacttaatctgaaaggaaaaccgctgcccgagatgctggccgaaccggcccaaagtcctacttacgcggtcgtgcccgacgattttgaaggtgttatccccaaggtgacggctcgtccgggggataaggtgcgtgccggctcagcactgatgcaccacaaggcatatccggagatgaagtttacaagtccggttagcggcgaagtgatcgcggtgaatcgcggtgccaagcgcaaggtgttgagcatcgaggtgaaaccggacggactgaacgaatacgagtcattccctgtcggggatccgtctgccctctctgccgaacagatcaaggagcttttactgtcgagcggtatgtggggttttattaagcaacgtccttacgacatagtggctacaccggatatagctccacgcgacatttatattactgccaactttactgcaccattggctccggacttcgatttcatcgttcgaggagaagaacgcgccctgcagactgccatcgatgccttggccaaactcacgacaggaaaggtgtatgtgggcctgaagccgggttcatctctgggcttgcacaatgcagaaatcgtagaagtacacggacctcatccggcaggtaacgtgggcgtgctgatcaatcatacgaagccaatcaatcggggcgaaacggtgtggacgctcaaggctaccgacctgatcgtgatcggacgtttcctgcttacgggcaaagccgattttaccagaatgattgccatgaccggctcagacgctgcagctcacggatacgtccgtattatgccgggttgcaatgtctttgcttccttccccggccgactgacaataaaggaatctcacgagcgtgtgatcgatggcaatgtgctgaccggtaagaagctctgcgagaaggagcctttcctgtcagcccggtgtgaccagatcacggtgatccccgaaggcgacgatgtggacgaactcttcgggtgggctgcaccccgtctcgatcagtacagcatgagcagagcttatttctcttggttgcaggggaaaaacaaagagtacgtactcgatgcccggatcaagggtggcgaacgtgctatgatcatgagcaacgagtatgaccgcgttttcccgatggacatctatccggagtatttgctcaaggctattatagcattcgacatcgacaagatggaggacttaggcatatatgaagtggctccggaggactttgccacttgcgaatttgtggatacatccaagatcgagctgcagcgtatcgttcgcgagggcttggatatgctctataaggaaatgaat

SEQ ID NO: 35 - DNA, 585 bp, Porphyromonas gingivalis
atggataaagtgagctatgctctgggattgagcatcggtaataatttcaagtcttcgggcatcgacagcgtcgttatggatgatttcatgcaaggtctgtctgatgtactggaagaaaaagcccctcagctctcgtatgacgaggccaagcgcgaaatagaggcgtatttcatggatttgcagcagaaggctgtcaaactgaacaaagaggccggagaagaattcctcaagataaatgcacacaaggaaggtgtgacgaccttaccgagcggcttgcaatacgaagtcattaagatgggagagggcccgaaacccaccctttcggacacggtaacctgtcattatcacggtacgctcatcaacggtatcgttttcgatagctctatggacaggggagaaccggccagtttccctctaagaggagttatagccggctggacggagattcttcaattaatgcctgtaggatccaagtggaaagtaactataccgagcgatctggcgtatggagatcgtggtgccggcgaacatatcaaaccgggtagtacgctcatttttataatcgaattattgagtatcaacaaa

SEQ ID NO: 36 - DNA, 819 bp, Porphyromonas gingivalis
atgaaaaaagcattacttattggtgctgctcttttgggagcagtcagttttgcaagtgctcagtctttgagcacaatcaaagtacagaacaattcagtacagcaacctcgtgaggaagccactattcaggtttgtggagaattggcagagcaagttgactgcattgggacaggtaattctgcaatcatagccgctgcagcgaaatttgaaagcgatgatctcgaaagctatgttggctgggagatcatgagtgttgatttcttccctggatataaagcgtgcaagtacacatctgcagtctgggctgatgatatgaccattttgggccaatcagaagatagtgatcccgaaatgcagactatcaacaatcttgctctcaagactagtgtcaagattgaagccggcaagaattacatagttggttatattgctaataccgcaggtggacatcctatcggatgtgatcagggccctgccgttgatggttatggagatttggtttctatatcagaagatggtggtgctactttccctccgttcgaatctcttcatcaagcagttcctaccttaaattacaacatctatgtcgttgttcatttgaagaagggtgaaggtgttgaggctgttcttaccaacgacaaggctaatgcttatgttcagaatggcgttatctatgtagccggagctaatggtcgtcaggtatctctgttcgacatgaacggtaaggttgtttataccggcgttagcgaaacgattgcagctcctcagaagggcatgtatatcctccgtgtaggtgctaagagcatcaagctggctatc

SEQ ID NO: 37 - DNA, 1662 bp, Porphyromonas gingivalis
atgccaagaattatgaaattaaaaattgcactcagactgctgctggcgacttttgccatagttttatttagccctctggccaaggcccagatggatattggtggagacgatgtattgatcgagacgatgtccaccctatcaggatattcagaggatttttattacaagatggctgtggcagacaatggatggatctatgtgatgttggatttctctcgtatttattttgatgatgtcaggctgtatcgttccaaagacggtggtgctacttaccaaaagttagggtctttggggtctttggtgccttatgacttcgatgtctcgcattgcgattttattgtaacgggaaaggatgaagatgatatcaatgtttggacagtcatgacagcattcgaatatgtaggtggtactattggcaatggcgttttgctgatgcatcgccatgatgcagatatcaataatacagagtgtgtgtacaagaaggatttccctaataatagactgatgggtgtagccatcgcctccaactaccgtgcgccctctccttacggtttggggggcgatccttttgctctcgctgtcgccgttagtggctccggaagcgatcacagcttcttggactatattttttcgttagatggtggagtacactttgagcaaaagcgtatttacacaagaccccaaaaactgactatcaatagagtagacctttcattaggcagtacatctccttctcttggatttaatacttggccactaatgggagtcgtattcgaaatgaataagaaccttgatggcttcgacattggtttcatttccaactttgtggactatgatccccgctatgcgtggtctgaaccgataataatagaagaagactgtggatggactgattttaatcctttgggagcactaagtatagagatccaaatgatgttggatgacaattcggataataccgtgggtggagaacgctcccataacttcctgatcacttacccgggccattacgtatatccgaagcaatctttcaattattctcccggacatacaccgacaaagaaagatctggtctttaaacactgtataggtattccggctttggcatacgataaggaaggcgatcgttatctgactacttttcaagatcacaatctaatgagatacagatggatcaaatacgatgacattaactctttttatggttggagttggccatatgtatatgcaaaagaagctaaagataaaaagaggcgccgtccgcaagtagcactcaatcctaccaatggaaaggcttgttgggtatggcatactcgcaagagcccatatgatgaaaccaaaccacatcctactcctgtaattattaaacatttcctatggtccgatacggagtgggtacatgctctggacgtgggggacgtattgcagaaggagggtagcatgaagctctaccccaatcctgccaaagaatatgttctgatcaacctacccaaagaaggggggcacgaggcagtcgtatacgacatgcagggccgaatcgtggagaaagtttcattttcagggaaagaatataagctgaatgtgcagtatctgtccaaaggtacgtacatgctgaaagttgtagcggatacggagtatttcgtggaaaaaatcattgtagag

SEQ ID NO: 38 - DNA, 1650 bp, Porphyromonas gingivalis
atgaaattaaaaattgcactcagactgctgctggcgacttttgccatagttttatttagccctctggccaaggcccagatggatattggtggagacgatgtattgatcgagacgatgtccaccctatcaggatattcagaggatttttattacaagatggctgtggcagacaatggatggatctatgtgatgttggatttctctcgtatttattttgatgatgtcaggctgtatcgttccaaagacggtggtgctacttaccaaaagttagggtctttggggtctttggtgccttatgacttcgatgtctcgcattgcgattttattgtaacgggaaaggatgaagatgatatcaatgtttggacagtcatgacagcattcgaatatgtaggtggtactattggcaatggcgttttgctgatgcatcgccatgatgcagatatcaataatacagagtgtgtgtacaagaaggatttccctaataatagactgatgggtgtagccatcgcctccaactaccgtgcgccctctccttacggtttggggggcgatccttttgctctcgctgtcgccgttagtggctccggaagcgatcacagcttcttggactatattttttcgttagatggtggagtacactttgagcaaaagcgtatttacacaagaccccaaaaactgactatcaatagagtagacctttcattaggcagtacatctccttctcttggatttaatacttggccactaatgggagtcgtattcgaaatgaataagaaccttgatggcttcgacattggtttcatttccaactttgtggactatgatccccgctatgcgtggtctgaaccgataataatagaagaagactgtggatggactgattttaatcctttgggagcactaagtatagagatccaaatgatgttggatgacaattcggataataccgtgggtggagaacgctcccataacttcctgatcacttacccgggccattacgtatatccgaagcaatctttcaattattctcccggacatacaccgacaaagaaagatctggtctttaaacactgtataggtattccggctttggcatacgataaggaaggcgatcgttatctgactacttttcaagatcacaatctaatgagatacagatggatcaaatacgatgacattaactctttttatggttggagttggccatatgtatatgcaaaagaagctaaagataaaaagaggcgccgtccgcaagtagcactcaatcctaccaatggaaaggcttgttgggtatggcatactcgcaagagcccatatgatgaaaccaaaccacatcctactcctgtaattattaaacatttcctatggtccgatacggagtgggtacatgctctggacgtgggggacgtattgcagaaggagggtagcatgaagctctaccccaatcctgccaaagaatatgttctgatcaacctacccaaagaaggggggcacgaggcagtcgtatacgacatgcagggccgaatcgtggagaaagtttcattttcagggaaagaatataagctgaatgtgcagtatctgtccaaaggtacgtacatgctgaaagttgtagcggatacggagtatttcgtggaaaaaatcattgtagag

SEQ ID NO: 39 - DNA, 1170 bp, Porphyromonas gingivalis
atgaaacgattactcccctttctccttttagcaggactcgtagccgtaggaaacgtgtctgctcagtcaccccgaatccctcaagtggatgtacacactcgcatcgcaagaaatgcccgttatcgactggacaagatcagtgtcccggattctcgtcagatattcgattacttctataaagaagaaacgatacccactaaaatacaaacgaccacaggaggtgcaattacaagcatcgattcgcttttctatgaagacgacaggttggttcaggtgcgctattttgacaataaccttgaattaaaacaagcggagaagtatgtatacgacggttctaagctggtccttcgagaaattcgcaagtcgccgacagacgaaacgccaataaagaaagttagctatcactatctctgtggcagcgatatgccttttgagattacgacagagatgagcgatggctattttgaaagccatacgcttaactatctgaatggaaagattgcccgaatagatatcatgactcaacagaacccatcggccgaattgatcgaaacgggtagaatggtatatgagtttgatgccaataatgatgctgtactgcttcgtgacagtgtatttcttcctcttcaaaacaagtgggtagaaatgtttactcaccgttatacatacgacaataagcataattgtattcgttgggaacaagacgaattcggcaccctcacccttgccaacaacttcgaatacgacaccactatccctctgtcgtctgtattgttccccacgcatgaggagttcttccgtcctcttcttcccaattttatgaagcatatgcgtacgaagcaaacgtatttcaataactccggagaaggcttgtcagaggtatgcgattacaactacttctataccgatatgcagggtaatgcactgaccgatgttgccgtgaacgaatcgatcaagatttatcctcgtcctgccacggattttctgcgtatagaaggttcgcaactgcttcgcctttcgctattcgacatgaacgggaagctcatcagagctaccgaattgacaggcgatttggccattatcggagttgcatctcttccgagaggcacttacatcgcagaaataactgctgcaaacagcaaaaccatacgtgcaaaagtatcgctcaga

SEQ ID NO: 40 - DNA, 939 bp, Porphyromonas gingivalis
atgagagcaaacatttggcagatactttccgtttcggttctctttttcttcgggacagcgatcggacaggctcagagtcgaaaccgtacatacgaggcttatgtgaaacagtacgccgacgaagctatccgacagatgagccgctacaatataccggcaagcatcaccatagcacaggctttggtggagacaggagccggagccagtacactggccagcgtacacaacaatcacttcgggatcaaatgccacaaatcgtggacgggcaagcgcacctatcgtaccgacgatgcgccgaacgaatgcttccgcagctattcggccgctcgcgaatcgtatgaagatcattcccgatttctgctccaaccacgctatcgtcccctgttcaaactcgacagagaagactatcggggctgggctacggggttgcaacgctgtggctatgccaccaatcggggctatgccaatctgctgatcaagatggtggagctgtatgagctatatgctttggatcgcgagaagtacccctcatggttccacaagtcttaccccgggtccaacaaaaaatcccatcaaacgaccaagcagaagcagagcggactcaagcacgaagcttacttcagctacggactgctctacatcatagccaagcaaggcgataccttcgattctttggccgaagagttcgacatgagagcctccaaactggccaaatacaacgatgctcccgtggatttcccgatcgaaaagggcgatgtgatctatctggagaaaaagcacgcatgctccatctccaaacacacacagcacgtagtgcgtgtgggcgattcgatgcacagtatctcccaacgctatggcatccggatgaagaacctctacaagctcaacgacaaggatggcgaatatataccccaagagggcgatatactgcgcttgcgc

SEQ ID NO: 41 - DNA, 813 bp, Porphyromonas gingivalis
atgaatagcagacatctgacaatcacaatcattgccggcctctccctctttgtactgacattgggcggctgctccgtagcccaacaagatacgcagtggactctcggcggaaagctctttacttcggcgtggatacaacgttcggccgaatatcaagcgctttgcattcaggcatacaacatcgctacggaaagagtggacgctctaccggcagaacgtaaacaaggagataggccttatgccatcgtaacggacatagacgaaaccattttggacaatacgcctaactccgtgtatcaggctctcaggggcaaggattatgatgaagagacttgggggaaatggtgtgcacaggccgatgccgacacactggcaggagctttgtctttcttcctccatgcagcgaacaaggggatcgaggtcttttacgtcaccaaccgcagagacaatctgcgcgaagcaactcttcagaaccttcagcgttacggattcccctttgccgatgaagaacatttgcttacgacccatgggccatccgacaaagaaccccgtcggctcaaaatacaagaacagtatgaaatagtattgctcataggagacaacttgggcgacttccaccacttcttcaatacgaaagaagagtccggacgcaaacaggctctgggcctgacagccggggagtttggccggcacttcatcatgctgcccaatcccaactacggatcttgggaaccggcatggtacggcgggaagtatccgccactgcccgaaagagacaaagcacttaaacaactgcactcacagaacagcaga

SEQ ID NO: 42 - DNA, 2271 bp, Porphyromonas gingivalis
atgcggacaaaaactatcttttttgcgattatctcttttattgctctattgtcgtcttctctgtcggctcagagcaaagccgttttaaccggtagtgtgtcggatgccgaaaccggagagcctcttgccggtgctcgaatcgaagtcaaacacaccaacatagtagccggtgccgatgccggcggacatttcgagatcaagaacctgccggcagggcagcatactattatatgttcgttgggggggtatggacagaaagaggaggtggttgccatcgaagccggacagaccaaaacgatctcttttgcattgcgactgcgaacgaacaacttggaggaagtcgtcgttaccggtaccggtacacgttaccgcttggtcgatgctcctgtggcaacggaagtccttaccgctaaggacatagcctctttctcggctcctacttccgaggccttattgcaggggctgagtccgtcttttgacttcggccccaatctgatgggctctttcatgcagctgaacggccttagcagtaagtatatcctcatccttatcgatggtaagcgtgtgtacggcgatgtaggcggtcaggccgatttgagtcgtatttctcctgatcagatcgaacggatcgaactggtgaaaggtgcttcgagttcgctctacggatccgatgccatcgccggggtaatcaatgtgatcacaaaaaagaatacgaatcgactgagtgcatatacgtcacatcgcatatcgaagtacaacgatcggcaaaccaatacttcgctcgatataaacatcggtaagttcagtagcaataccaactatttcttctaccatacggatggctggcagaatagtccgttcgaaataaaaaagaaaaaaggatccggcgaaccggtcttggaggaaacgtataagaaaacttttcgtgcacaggaaaatcagggtgtaagccaatcgctttcctattatgcaactaacaatcttagcttcagcggaaatgtgcagtacaataaacgtcagatcttcactccgactttttccgaaaagaaggcctatgacatggattatcgtgctttgacggcttcactcggtacgaactatcttttccccaatggtctgcatacgctttctttcgatgccgtctacgatcgcttccgtttcggatatttgtatcatgacaaggacagcagtgagagcctgatcaacaaccaaggtcagaccgagcaacccacattctttccgggtcagctacgcaataaaaacgatcagatccgatacacggcagaggctcgcggtgtatttacactgccttatgcgcagaaactgaccggcggtttggagtatttccgtgaggaattgatctctccctataatttgattaccgacaaggcagatgcttccacgctctctgcttatgtacaagatgaatggaaaccgctcgattggttcaatatgacagccggtttccgtctggtacaccatcaggagttcggtacacgaatgacgcctaaggtatccatactcgccaagtatgggccgctgaacttccgcgctacgtatgctaacggctataagactcccacgctgaaagagctttttgcacggaacgaactcaccactatgggttcgcacaatctctatctcggcaatgcggatcttaagccacagatgtcggattattatgctttgggcttggagtacaatcaaggccctatctcgttcagtgcaacggtttatgacaatgaacttcgcaatctgatctcctttatggatataccgacctcacccgagcacgaagctcagggaatcaagaaaaccaagcagtatgccaacataggaaaagctcgcagccgcggccttgatgtcctatgtgatgcctctatcggttggggtatcaagttaggagccggatacagcctcgtggaagctaagaatctccagacggatgagtggctggaaggagctgcacgtcatcgtgccaatgtgcacgccgattgggttcactactggggtcagtatagacttggcgtgagccttttcggccgtattcagagcgagcgttactacaaagacggcaatgctccggactataccttgtggcgactcgccacatcgcatcgtttcgctcatttccgccacatcatcctggatggaacgctcggtatagacaacctgtttgactacgtggatgatcgtcctatgggtgtcaattatgctaccgtaacgccgggacgtactttctttgctcaaatagcgattcgattcaacaac

SEQ ID NO: 43 - DNA, 993 bp, Porphyromonas gingivalis
atgacggacaacaaacaacgtaatatcgtattcccggcgtttctcctcttgctgggagtcatcgcagtggtgacgatcgttggttttttcatgctcagaccggccgaggagattatccaaggacagatagaagtgaccgaataccgagtgtccagcaaagtgcccgggcgcatcaaggaacttagggtatccgagggacagcaggtgcaggccggcgataccctcgctgtcatcgaagcccccgacgtagcggctaagatggagcaggcaaaggctgccgaagcagctgcacaggctcagaacgccaaggctctcaaaggagcacgcagcgaacagatacaggcagcctatgagatgtggcagaaagctcaggccggcgtagccatagcgaccaagacacaccagcgcgtgcagaacctctatgaccagggagtggtaccggctcagaagttggacgaagccactgcccagcgcgatgcggccatcgctacgcaaaaagcggccgaagcccagtacaatatggctcgcaacggtgccgaacgcgaagacaagctggcagcttctgccctcgtcgatagagcgagaggagccgtcgccgaggtggagtcgtacatcaacgaaacctacctcatcgccccacgggcaggcgaagtgtcggagatattccccaaagccggcgaactcgtaggtaccggcgcacctatcatgaatatcgccgagatgggcgatatgtgggccagctttgccgttcgtgaggatttcctcagcagcatgaccatgggagccgttctggagactgtggtgccggctctgaatgaagaaaaagtacgcttcaagatcacattcatcaagaacatgggtacctatgctgcctggaaagcgaccaagacaacagggcagtacgacctgaagaccttcgaggtaaaggccacccttgcggataaagacaaggcacaaaagctacgcccgggtatgtccgtgatcatacgcaag

SEQ ID NO: 44 - DNA, 3051 bp, Porphyromonas gingivalis
atgaaaagaatgacgctattcttcctttgcttgctgacgagcattgggtgggctatggcccagaatagaaccgtgaagggtacagttatctcctccgaggataatgagcccctgatcggcgcgaatgtcgtggttgtcggaaacaccactatcggtgctgcaaccgacttggatggcaacttcacgcttagcgtgcctgccaatgccaaaatgttgagagtgtcctattccggtatgactaccaaagaggtcgccatcgctaatgtgatgaagatcgtactggatccggactctaaggttctggagcaggtagttgtattgggttacggtacgggacagaaactcagcactgtttccggttctgtggccaaagtgtccagcgaaaagctcgcggaaaagcccgttgccaatatcatggatgccctccaaggtcaggtagccggtatgcaggttatgactacatccggtgaccctactgccgtcgcttctgtggagatccatggtacagggtcgttgggggcaagctctgcaccattgtatatcgtggatggtatgcaaacttctttggatgttgtggctacgatgaatccgaatgattttgaatctatgtccgttttgaaagatgcttctgcaacatctatttatggagctcgtgctgcaaacggagtcgttttcattcaaacgaagaaaggtaaaatgagcgagagaggtcgtattacctttaatgccagttacgggatttctcaaatcctgaatactaagccccttgataatatgatgactggagatgaattgctggattttcaggtgaaggcaggtttttgggggaacaatcaaaccgttcagaaggttaaagatatgatccttgccggagctgaagatttgtatggcaattatgattctttgaaagatgagtatggtaagacattgttcccagtggattttaatcatgatgcagactggctcaaggctttgtttaaaacagcacccaccagtcaaggtgatatttctttctccggagggtctcagggaacttcatattatgcctctataggctacttcgatcaggaaggtatggctcgtgaaccggcaaattttaagcgctatagtggccggctcaacttcgaaagtcgtatcaatgaatggctgaaagttggtgcaaatttgtctggtgcgatagcgaatagacgatctgccgactattttggaaagtattatatggggtcaggtactttcggtgtgttaacgatgcctcgttattataacccttttgatgtgaatggggatttagcagatgtctattacatgtatggagctaccagaccttctatgacagaaccgtacttcgcaaaaatgagaccgttcagttccgaatcacatcaggccaatgtaaatggtttcgcccagattactccgatcaaaggccttactttaaaggcacaggctggtgttgatattactaatactcgcacttcttctaagagaatgcccaataatccgtatgattctactcctcttggggaaagaagagaaagagcttatcgagatgttagcaagtcttttacaaatacggctgaatataagttttcaattgatgaaaaacatgatcttacagcattgatggggcatgaatatattgaatatgaaggggatgttattggggcatcttctaaaggatttgaaagtgataagttgatgttactgagccagggaaaaaccggaaatagtttgtctttgcctgaacacagagtcgctgaatatgcctatttgtctttctttagtcgttttaattacggttttgacaaatggatgtatatagatttctctgttcgtaatgaccaatcctctcgattcggatccaataatagaagcgcgtggttctattctgtcggtggaatgtttgacatatataataaattcattcaagaaagtaattggctcagtgatcttcgactgaaaatgagttatggtacaacgggtaactcggagattggtaattacaaccaccaagcactcgttactgtgaacaattatactgaagatgctatggggcttagcatttctacagcaggcaatcccgacctctcgtgggaaaagcagtctcagttcaacttcggtttggctgcaggggctttcaataatcgcttatctgcagaggtagatttctatgtccgcactacgaatgatatgttgattgatgtcccgatgccttatatcagtggtttcttctcacagtatcagaatgtaggctctatgaaaaatacgggtgtagacctttctcttaaggggacgatctaccaaaataaggactggaatgtatatgcttctgcgaatttcaactacaatagacaggaaataacaaagcttttcttcggtctcaataagtacatgttgcctaataccggtactatatgggaaattgggtaccccaattcgttctatatggctgaatatgctggaatcgacaaaaaaaccggtaagcagttgtggtatgttcctggtcaagtcgatgcggatggtaataaagttacaacaagccagtactcagctgacttggagacacgaattgataagtctgttactcctcctattacaggtggtttctccttaggtgcttcttggaaaggactttctttagatgctgattttgcctacatcgttggtaaatggatgatcaataatgaccgttactttacagagaatgcaggtggattgatgcaattaaataaagataaaatgctattgaatgcctggacagaggataataaagaaacagatgttccaaaattgggacagtctcctcagtttgatacgcatttgttggagaatgcttctttcctgcgtttgaagaatctcaaactcacctatgtactccccaatagtctttttgctgggcagaatgtgattggtggagctcgtgtctatttgatggcgcgcaatctgttaactgttacgaagtataaaggctttgaccctgaagcaggggggaatgtgggaaaaaatcaatatcctaattctaagcagtacgttgcgggtattcagttgtctttc

SEQ ID NO: 45 - DNA, 3042 bp, Porphyromonas gingivalis
atgacgctattcttcctttgcttgctgacgagcattgggtgggctatggcccagaatagaaccgtgaagggtacagttatctcctccgaggataatgagcccctgatcggcgcgaatgtcgtggttgtcggaaacaccactatcggtgctgcaaccgacttggatggcaacttcacgcttagcgtgcctgccaatgccaaaatgttgagagtgtcctattccggtatgactaccaaagaggtcgccatcgctaatgtgatgaagatcgtactggatccggactctaaggttctggagcaggtagttgtattgggttacggtacgggacagaaactcagcactgtttccggttctgtggccaaagtgtccagcgaaaagctcgcggaaaagcccgttgccaatatcatggatgccctccaaggtcaggtagccggtatgcaggttatgactacatccggtgaccctactgccgtcgcttctgtggagatccatggtacagggtcgttgggggcaagctctgcaccattgtatatcgtggatggtatgcaaacttctttggatgttgtggctacgatgaatccgaatgattttgaatctatgtccgttttgaaagatgcttctgcaacatctatttatggagctcgtgctgcaaacggagtcgttttcattcaaacgaagaaaggtaaaatgagcgagagaggtcgtattacctttaatgccagttacgggatttctcaaatcctgaatactaagccccttgataatatgatgactggagatgaattgctggattttcaggtgaaggcaggtttttgggggaacaatcaaaccgttcagaaggttaaagatatgatccttgccggagctgaagatttgtatggcaattatgattctttgaaagatgagtatggtaagacattgttcccagtggattttaatcatgatgcagactggctcaaggctttgtttaaaacagcacccaccagtcaaggtgatatttctttctccggagggtctcagggaacttcatattatgcctctataggctacttcgatcaggaaggtatggctcgtgaaccggcaaattttaagcgctatagtggccggctcaacttcgaaagtcgtatcaatgaatggctgaaagttggtgcaaatttgtctggtgcgatagcgaatagacgatctgccgactattttggaaagtattatatggggtcaggtactttcggtgtgttaacgatgcctcgttattataacccttttgatgtgaatggggatttagcagatgtctattacatgtatggagctaccagaccttctatgacagaaccgtacttcgcaaaaatgagaccgttcagttccgaatcacatcaggccaatgtaaatggtttcgcccagattactccgatcaaaggccttactttaaaggcacaggctggtgttgatattactaatactcgcacttcttctaagagaatgcccaataatccgtatgattctactcctcttggggaaagaagagaaagagcttatcgagatgttagcaagtcttttacaaatacggctgaatataagttttcaattgatgaaaaacatgatcttacagcattgatggggcatgaatatattgaatatgaaggggatgttattggggcatcttctaaaggatttgaaagtgataagttgatgttactgagccagggaaaaaccggaaatagtttgtctttgcctgaacacagagtcgctgaatatgcctatttgtctttctttagtcgttttaattacggttttgacaaatggatgtatatagatttctctgttcgtaatgaccaatcctctcgattcggatccaataatagaagcgcgtggttctattctgtcggtggaatgtttgacatatataataaattcattcaagaaagtaattggctcagtgatcttcgactgaaaatgagttatggtacaacgggtaactcggagattggtaattacaaccaccaagcactcgttactgtgaacaattatactgaagatgctatggggcttagcatttctacagcaggcaatcccgacctctcgtgggaaaagcagtctcagttcaacttcggtttggctgcaggggctttcaataatcgcttatctgcagaggtagatttctatgtccgcactacgaatgatatgttgattgatgtcccgatgccttatatcagtggtttcttctcacagtatcagaatgtaggctctatgaaaaatacgggtgtagacctttctcttaaggggacgatctaccaaaataaggactggaatgtatatgcttctgcgaatttcaactacaatagacaggaaataacaaagcttttcttcggtctcaataagtacatgttgcctaataccggtactatatgggaaattgggtaccccaattcgttctatatggctgaatatgctggaatcgacaaaaaaaccggtaagcagttgtggtatgttcctggtcaagtcgatgcggatggtaataaagttacaacaagccagtactcagctgacttggagacacgaattgataagtctgttactcctcctattacaggtggtttctccttaggtgcttcttggaaaggactttctttagatgctgattttgcctacatcgttggtaaatggatgatcaataatgaccgttactttacagagaatgcaggtggattgatgcaattaaataaagataaaatgctattgaatgcctggacagaggataataaagaaacagatgttccaaaattgggacagtctcctcagtttgatacgcatttgttggagaatgcttctttcctgcgtttgaagaatctcaaactcacctatgtactccccaatagtctttttgctgggcagaatgtgattggtggagctcgtgtctatttgatggcgcgcaatctgttaactgttacgaagtataaaggctttgaccctgaagcaggggggaatgtgggaaaaaatcaatatcctaattctaagcagtacgttgcgggtattcagttgtctttc

SEQ ID NO: 46 - DNA, 2463 bp, Porphyromonas gingivalis
atgaagaaaaagaattttttgcttcttggcattttcgttgctttgctgactttcatcggcagcatgcaggcacaacaggccaaagattatttcaactttgacgaacggggcgaggcctacttctcattcaaagtgcctgatagggccgttctacaagagctggctctgatcatgtccatcgacgagtttgaccccgtaaccaatgaagccattgcctatgccagcgaagaggagttcgaggcattcctgcgctatgggctcaagcctacattcttgactcctccatccatgcagcgcgctgtcgagatgttcgactaccgctcaggagaaaaatacgaatggaatgcttaccccacctatgaagcctatatcagcatgatggaagagttccaaacaaagtatccatcactttgtactacttccgtcattggcaagtccgtaaaggatcgtaaactgatgatttgcaagctgacgtcctctgccaatacagggaaaaagcctcgcgtgctctatacttctacgatgcacggagacgaaacgaccggatatgtggtactgctccgactcatagaccatctgctgtcgaactacgaatccgatccgaggattaagaacattctggataaaacggaagtatggatctgccctttgaccaatccggacggagcatacagagccggaaaccacaccgtacaaggagctactcgctacaatgccaacaatgtcgatttgaaccgtaacttcaaggatgatgtagccggtgatcaccccgatggaaaaccttggcagccggaggcaactgcattcatggatttggaaggaaacacctctttcgtgctcggtgccaatatacatggaggaacagaggtggtgaactatccatgggataataaaaaagaaagacatgcagacgatgagtggtacaaactgatcagtcgcaactacgcagccgcttgtcagagtatttccgccagctacatgacctccgaaaccaattcgggaatcatcaacggttcagactggtatgtaattcgcggaagtcgtcaggacaatgcaaattatttccatcgtctgcgagaaattacccttgaaatcagcaacacgaagttggtgccggcctctcaacttccaaagtattggaatctgaacaaagaatctctgcttgctctgatcgaagaatccttatacggcatccatggtacagtgacttccgctgcgaacggacagcctctcaaatgccagatcttgatagaaaaccatgacaagcgcaactccgatgtttactccgatgctaccacaggctactacgtacgtcctatcaaagccggcacttatacggtgaaatacaaagccgagggttatcctgaggcaactcgtaccattacgatcaaggacaaagaaaccgtcatcatggacattgcattgggcaactcggttcctctgcctgtacccgatttcacagcttctcctatgaccatctcagtaggcgaaagcgtccaattccaagatcaaacgacaaataaccccacgaattgggagtggacgttcgaaggcggacagcctgccatgagtacagagcagaatccgctcgtatcctatagtcatcccggtcagtacgacgttacgctcaaagtgtggaatgcaagtggttccaacacgattacgaaagaaaaattcatcactgtcaatgccgttatgcctgtagctgaattcgtcggtaccccgacggaaatagaagagggccagacggtatctttccaaaaccaatccaccaatgccaccaactacgtatggatattcgatggcggcactcccgctaccagtgaagacgaaaacccgactgtgctttacagcaaagccggccaatacgatgtcacgctcaaggcgatcagtgcttccggtgaaacggtgaagacgaaagaaaaatacatcactgtcaagaaagctccggtccctgctccggtagccgacttcgaaggaacacctcgaaaagtaaagaaaggcgagacagttactttcaaagacttgtctacgaacaatccgacttcatggctttgggtgttcgaaggcggctctcctgccaccagcacggagcaaaacccggtggtcacctacaatgaaacaggcaagtacgatgtccagctgactgccaccaacgagggcggaagcaatgtgaagaaagcagaagactacattgaggttatcctcgatgacagtgtcgaggacatagtggcacagacgggtatcgtcattcgtccgcaaaacggaacgaagcagatcctcatagaagccaacgctgctatcaaagcgatcgttctctatgacatcaatggacgggtcgtactcaaaactactccgaatcagctccgctcgaccgtagatctttccatcctgcccgaaggaatctacaccatcaatatcaaaacggaaaaatccgctcgcacggaaaagatccatatcggg

SEQ ID NO: 47 - DNA, 228 bp, Porphyromonas gingivalis
atgcgactgatcaaggcttttctcgtgcaactcttactgctccccattttcttctacaagcggtttatatcgccgcttacaccgccttcatgccggtttaccccctcatgttcgtcctatgccatcgaagccttacgtaaatatggcccgggcaaaggactattgctgagcatcaagcgtattctccgctgtcacccgtggggtggaagtggctatgaccccgttccg

SEQ ID NO: 48 - DNA, 1251 bp, Porphyromonas gingivalis
atgaattacctgtacatactgattacacttttactctccggctttttttccggtgctgagattgctttcctttcttcggacaaactgcgtcttgagttggacaggaatagaggcgatctcacaggcagagcgttaaacttgctgtatcgacatccggaccaactggtgactactctccttgtgggtaataatatcgttttggtagtctatggtctgctgatggcgggattgctggccgcacctttggcgcaatggattgataacgatgctatgatcgtcgttctccaatctgtcttatccactatcatcatactgtttaccggggaatttctacccaaagccattttcaagaccaatgccaatatgatgatgagggtattcgccctccctatcgtagcgatctattatctgctttatcctctgtctaaactcttcaccggtttatctcgctcttttattcgtctggtggacaagaattatgtgcctacaacagtagggttggggcgcgtagatctcgatcattatttggcagaaaatatgtccggagaaaacgaacagaacgacttgactaccgaagtgaaaatcatccagaatgcgctggatttttccggtattcaggtgcgagactgcatgatcccacgcaatgagatgatagcatgtgagttgcaaacggatattgaagtactcaaaacgacttttatcgataccggtttgtccaagatcattatctacagacagaacatagatgacgtagtaggatatatccattcgagcgaaatgtttcgtgggcaagactggcaaaaacgtatcaatactactgtattcgtacccgaaagcatgtatgccaataaactgatgcgactactcatgcagcgcaagaaaagcattgcgatcgtcatcgatgaacttggaggtacggccggaatggtcacattagaggatttggtagaagagattttcggtgacattgaggacgaacacgacactcgcaagatcatagccaaacagctcggccctcatacctatctggtcagtggtcgtatggaaatagatgatgtgaacgaacgttttgggttgtccttgcctgagtctgacgactaccttaccgtggccggatttatcctgaatagccatcaaaatatcccacaggccaatgaggtcgtggagattgctccttatacttttaccattctcagatcttcttccaccaagatcgaactggtgaaaatgtccatcgacgaccaatcgaac

SEQ ID NO: 49 - DNA, 879 bp, Porphyromonas gingivalis
atgaaacagaactacttcaaaagagtctgctcactgctttggctggttttacccatgcttattatgccattggaagtagcagctcaagagattattccgaacgaagaggtgttggaatcattgactttcgttgcaccggttgaggagacagacgcaatagaggcagaggtagaagctctgcaggagatagtcgctactgaggagattgcggagcaggctgttcgttcttatacctacacggtctatcgtgatggcgtgaagattgcttcaggattgactgagcccacttttctcgatgaagatgttcctgccggcgaacatacctactgcgtagaagtacagtatcagggaggcgtatccgacaaagtatgcgtggacgtagaggtgaaggacttcaaaccggttaccaatctcaccggaactgcttccaatgacgaagtttctttggactgggacggtgtggaagagaaagctgaagagccggcaagtgataaagcagtcagctacaacgtctacaagaatggaaccttgatcggtaatacagctgaaactcattatgtggagaccggtgtagccaatggtacatacatctacgaagtggaagtaaagtatcctgacggtgtatctccgaaggtggctgtaaccgtgaccgtgaccaacagctcattgagcaatgtagatggacaggctccttacacattgcgagtagaaggcaagaagattattgcggaagcccatggtatgatcacgctctacgacatcaacggacgtaccgtggccgtagccccgaatcgattggaatacatggcgcaaaccggtttctatgcagtgcgcttcgatgtggggaataaacaccatgtatcgaaaatacaagtaaga

SEQ ID NO: 50 - DNA, 936 bp, Porphyromonas gingivalis
atgattcctctaagcgagagttttgaatcaggtattccagctatatggaagaccattgacgcagatggcgatggctataattggatgcatttgaccaatttcacgggacagagtggtctctgtgtctcttcggcttcatacataggcggcgtcggagctttgactccggacaattatctgataacacccgaattaaaactacccacagacgcgttggtggaaataatctattgggtatgtactcaagatctcactgctccatcggagcactatgccgtttattcctcttctacaggcaataatgctgctgactttgttaatctcttatatgaagagactttgactgccaaacggatacaatcccccgagttgatccgcggaaatcggacacaaggtgtttggtatcaaagaaaggtggtactccctaacgatactaaatatgttgctttccgccattttaattccacggataatttctggctcaatttggatgaagtatctatcctgtatacccctcttccccgaagagctccgtgtccgcatccgggtggttacacttattctgtattccgtgatggacaaaagatagcgagtggattgtcggcattggcatatatcgatacggatgtaccgtatgggactcaagactattgtgtccaagtcaattatctgcaaggagactcgtataaagtctgcaaaaatatagtggtggcaaattctgcaaacatctatggggcggataagccttttgcgttgaccgtggttggcaagaccattgtagcgagtgctttcaaaggagagatcactctttatgacattcgtggccggctgatagcttccggctgcgatacgcttaggtacaaagcggaaaatggtttttacctcattaaaatacaggtaaacggaactgtctatactgagaaaatccaaatccaa

SEQ ID NO: 51 - DNA, 2529 bp, Porphyromonas gingivalis
atgaaaaaaagttttcttttagccatagtaatgctctttggcattgccatgcagggacattctgctccggttacgaaagagcgagctttgagtctggctcggctggctttgcgacaggtatccttgcgaatgggacaaacagcagtatctgacaagatttccatcgattacgtttatcggcaaggagatgctgagaggggtatcacatcacaagaggaaggctctcctgcatatttttatgtagctaatcgtggaaataatgagggctatgctcttgtagcagcagatgacagaataccgacaattttagcctattcacccattggccgtttcgacatggacagtatgccggacaatcttcgcatgtggctacaaatttacgatcaggaaataggcctgatactttccggaaaagctcagctcaatgaagagatattacgtaccgagggcgtaccggctgaagtacatgctctgatggataacggtcattttgccaacgatcccatgcgatggaatcaaggttacccatggaacaataaggaaccactgcttcctaatggcaatcatgcctataccggctgtgttgctactgctgcagcacaaatcatgcgctaccatagctggccgcttcaaggtgaaggctctttcgattatcatgcaggttcattagttggcaactggtccggcacatttggtgaaatgtacgactggatcaatatgcccggaaatcccgaccttgataatctgactcaatctcaagtggatgcctacgccacactgatgcgtgatgtgagtgcatctgtttcgatgagtttttatgaaaatggaagtggtacgtacagcgtttatgtagtaggagccttgcgaaacaactttcgctacaagcgttcactgcagctacatgtacgcgccttatatacctcacaggagtggcacgatatgatccgcggggaacttgcctccggaaggccggtctattatgcagggaataaccagagcataggacatgctttcgtttgcgatggttatgcttcggatggtactttccatttcaactggggttggggaggtgtttccaacggcttctacaaactaacactcctctcgccgacttcgttgggtatcggaggtgagggaataggttttaccatttatcaagagatcatcaccggtatcgaaccggctaagactcccgctgaagccggtacagatgccttgccgatcttggcactgaaagacatagaagccgagtataaaagtgaatccggattgaacgtagggtattcgatatataatacaggtgaagagcaatcaaatcttgacctcggatacagattgaacaaggctgacggagaagtcatagaggtgaaaacttcatctatcaatatctcttggtacggatacggagagcatcccgagagtttctcattggcacctaatcagttgtcacaaggaatcaacaccatcaccctactttatcgtcgcacaggcaccgaacagtgggagccggtacggcatgcacagggaggatatgtcaatagcattaaagtaaatacgacagacccgaacaatgtcgtagtcacggtagataataacgaaggcaagctcagtatcgtccccaacagctttgtcgcagatctgaattcttatgaacatagtacgattacagtacagttcaatagcgacagccctgatgagatccgtacacccgtagcctttgctctatctacaggagctactgcggacgatgtaatatctttgggctgggtaatggctgaagttccgggcggtagcagcaactatccggtggtttggtctaaagacgttctcactctctcggaaggcgactatacattgtggtatagattttccatcaacaaccaaaaggatgaatggaaaaagatcggaagcgtgtcagtaaaaacaccgacagagtatacgcaccccttattcgaagtgggccataatcaaacttctacctatacgctggatatggcacacaacagagtattgcccgactttacactcaaaaatctcggattgcctttcaatggtgagttggttgttgttttccgccaaacacaatcctcatcggggtctttatgggcagctcaagaaacagtacatatcaagcaaggagaaactttcgtatataaacctgttgtcgaaggccctatacctgatggatcctatcgtgcgaccctccatgcattcgtaaacggacaacaacagttgtacctcaaggggaaaaggaactacacggtgaagatcgtcaatggtacagcggtagaagcaatagaatcgtcagaagagatcagagtattccctaatccggcacgcgattatgtggaaatatcggcaccttgcattccccaagaaacatctatcattcttttcgatctgtcaggcaagattgtcatgaagaatagtttatcagcggggcatggcagaatggatgtcagccgacttcctaatggggcctacatccttaaggtggatggatatacgacgaaaataaatatagtgcac

SEQ ID NO: 52 - DNA, 870 bp, Porphyromonas gingivalis
atgaaaaagctatttctctcgctcacgagtcttgtaatggtcttcgctgttgcaagttgcgatataatcgacaaggatcaaaccctcttgccggctccgaccaatgtgacacccgataatccggatgacaatccttcggagatcgacattacgcagacgcacacagaaaaatatgttttggctgaagaatttaccggccaaaaatgtctcaactgtccgaaaggtcatcgcaaactggcggctctcaaggagcaatacggtaagagattgactgttgtcggtatacatgccggccctggatctctcgtgccacctcttttccgtacagaagccggagacgcatattatagcaagttcgccaataatacccctctccctgcgctgatggtttcgcgcaaaaagttcggctcttcctacgtttatgataagagctacaaaacgtgggacgtgcctattgccgagcagatggagcaaaaggcgaagatcaatatctttgccgtggccgaatacaccgatacccaaaagatcaaggtgactgtaaagggtaaaatactggaggggaatacactcccgaagtccatggttcaggtgtatctgttggaggataagctgatcgctccgcaggtggatggcaatacgacagtcgagaattacgagcacaatcacgtgttgcgtggagccgttaatggtatttggggcgaagaatttgtgaatctcaaagattatttgtatacttacgccgttgaaccgctctcgggtatgtccttcgtagccgagaattattcgattgtggcttttgtatacgatgtgcagacgttcgaagtgtatgacgttgtgcatgtaaagatcaatccgcaatccgatggcaaa

SEQ ID NO: 53 - DNA, 669 bp, Porphyromonas gingivalis
atgaagaaatcaagtgtagtagcctcagttttggccgtggctctcgtgttcgccggttgcggactgaacaatatggcaaaaggcggccttatcggcgccggagtaggaggtgccattggtgccggagtaggtaacgtagccggaaatacggctgtcggtgccatcgtcggtactgcagtcggtggagcagccggtgctctcatcggaaagaagatggacaagcagaaaaaagaactggaggccgcagtacccgatgctacgattcagacagtaaatgacggagaggctattctggttactttcgatagcggtatcctctttgcgacgaactccagcactctgagtcccaactcacgcactgcgctgacgaagtttgctgcaaacatgaacaaaaaccccgacacggatattcgtatcgtaggccatacggacaataccggctccgacaagatcaacgatcctctgtctgagagacgtgcagccagcgtatattctttcctgaattctcagggtgtgagtatgtcgcgcatggcagccgaagggcgtgggagccatgaaccggttgcagacaatagcacagttgccggacgttcggccaaccgccgtgtggaggtttatatcttgccgaatgccaagatgatcgaacaagcacagcaaggtacgctgaag

SEQ ID NO: 54 - DNA, 2016 bp, Porphyromonas gingivalis
atgtacagcggacatcataaaatccattatccttttcttatcctgttggtatgccttgcttttgctgcctgcaagagcgtgaagttgaaagatgcggagaaggcacatgatcgccaagagtataccaaggctgccgatatgtacaatacattatacaggcgtacccgacgaaagcaggtggagatgaaagcttatacggctttccgatccggtgaaaactatcgtgccgccggcagacaagccaaagctttgcgtggctatctgaatgccagacgctacgggtatccggattctgtggtactgctccgtttggcacagacttatcagcaaggaggtaactataaggaagccgaggtactcttccgtggatatctggaagcttatccgaaaagttattttgcagctatcggtttggaggggtgtctctttgcccgccagcaaaaggaatatcctacacgttaccggatacggcgagctgccgagtggaattcggcacggggcgacttcggcccggcctatgcacccgatgcttcggctctctatttcacatcgagcagaagcaaagacgacggtttggataatagcagcataacgggactgaaacccaacgacatttatatcatcaaacgagatgcacaaggacgatggggacgtcccgatagcgtgtccggaggaatcaacactccatgggatgaaggcgtgccaacgatcacgcccgatggtagtaccatatattatacgttggcgcagcaaggagccgattacgaccgtacggtacagatctattccgccgctcggagcggagaaggcggttggagcaacggttcgctcgtggacattatgcgcgattcgctccgtatggctgctcatccctctatgtcggcatccggcgattacctgtatttcgtcagcaatataggcggtagctatggcggcaaggatatttatcgtgtcaaggtgtcggatcgttcttatggttcaccggagaatttggggcctgatatcaatacgccgggggacgaaatgtttcccttcatagatggggatagtacccttttcttcgcttcggacggacacgccggtctgggaggactggatattttcaaagccacgctggactctaccggccaatggcatgtagtcaatatgggacaaccggtcaattcctctgccgatgatttcggcttggctgtggagcctaaaggcaaaaacaaagaagaagctttgccggacaacggagtcaaaggtgtattttgttccaaccgaggcgatgcacgcggatggccgcacctcttccatttcgaactgccggctatctacaccgagattcaaggttatgtgatggacagagaagaaaatcccatagccggagccactgtcaggatcgtaggcgaacgcggccccgtaggacagggattcgtgactactcgtgacgatggctcctataagatgagcgtgcagggcgatactcgctatgtaatgcttgccggagcatcgggttatttgaatcagtacgtagaactcaagaccgataccgccaagcagagtgagacctactatgtggactttttccttgcatcgcgtgagaaagccgagggcttgcaaaatattttctatgatttcgataaagctactcttcgccccgaaagcatgaagagcttggacgaactgattcgtatcctcacggacaatccggatattcggatcgaattgggttcgcatgccgacaggaaaggccccgatgcttacaacctcggactatctgaccgcagagccaaatccgtggtggattacctcacgagtcgtggcatagcggccgacaggcttacgtggaaaggctacggtaagtctgtccccaagacggtgacagccaaaattgccgaacggcacgatttcctgaaggaaggcgatgtgctcaccgaggaattcgtagcacctttgaccgaggagcagcagtcagtctgcgaccaactgaaccgtcgtaccgagttccgtgtgatcgaagaagagttgcgt

SEQ ID NO: 55 - DNA, 945 bp, Porphyromonas gingivalis
atgatcagaacgatactttcacgatatgtatcctcgaacttttggagtcggggagctaccttttttttcacgattttcccggccttcatcctcgccgctactgctttgccggcttgtggagggggtactgcttcaggctccgatcgtacgctggctgtgaccatcgagccacagaaatacttcatcgagtccattgcggataagtcggtgcaggtggtggcattggtaccggccggcagcaatccggaggaatacgacccttcgcctaccgtgatgaagcgtttgtccgaagcagatgcctacttctatataggaggactggggttcgagcaaagaaatctcgctgccattcgggacaataaccctaagctccctcttttcgaaatgggcaaagccttggcggatgccggaagtgcagatctccacggctcctgcacagatcattctcatacagacctgcatgcccatgatccgcactattggagcagtgtggtaggggcaaaggcactcagtcgtgctgcatacgacgcgcttgtggagctttatccgaacgagaaagacaaatgggacaaagggcacgaccgtctcaacggacgtatcgacagcgtgaagagactcgtcgataccatgtttgccaatggcaaagcagacaaagccttcgtcatatatcacccatcgctcagctttttcgcccaagagttcggcctgcggcagatcgtcatagaggaagatgggaaagagcctacggctgcccaccttcgtcgtgtgatcgatcaggcacgtgccgatggtgtcagaatcgtatttatccaacccgaatttgaaacgcgtcaggcggaggacatcgcacgcgagatcggtgctcgtccggtaaggatcaatcctctgcgcagctcgtgggaggaggaaattttacatattgctcgcgctttggctcatgaacgg

SEQ ID NO: 56 - DNA, 2820 bp, Porphyromonas gingivalis
atgaacaaattttacaaatcacttttgcagtcaggactggctgccttcgtgtcgatggcaactgcactgaccgcttctgcacagatttcgttcggaggggaacccttgagtttctcttcaagatccgccggaacgcattcattcgacgatgcaatgactatccgccttactccggatttcaatccggaagacctgatcgcacagagccgttggcaatcgcaaagagatggccggcccgtccggataggacaagtaataccggtggatgtggactttgcatccaaggcttcgcacatctcttccatcggagacgtagatgtatatcgcctgcaattcaagttggaaggagccaaagccattacgctttattacgatgcattcaatattccggagggcggacgcctctatatctatacccccgaccatgaaattgtgttgggagcatatacgaacgccactcatcgccgcaacggagcttttgccacagagccggtaccggggagtgagcttattatggattatgaagtgtctcgcggagggactttgcctgacatcaagatctccggtgcgggttatatattcgacaaagtcggcggacgccccgtaacggataaccattacgggatcggtgaggacgattccgattcggattgcgagatcaacatcaattgtcctgaaggtgcagactggcaggcagagaagaacggtgtggtgcaaatgatcatggtaaaaggacagtatatctcaatgtgctcaggcaacctgctcaataatacgaaaggagactttactccgctgatcatttctgccggacactgtgcttccataacaaccaatttcggtgtaacgcaatccgagttggataagtggatcttcactttccactatgaaaaaagaggatgcagcaatggtacattggccatcttccgtggcaacagtatcatcggagcttccatgaaggctttcctcccgatcaaaggtaaatccgatggtctcttgctgcaactcaacgatgaagtccctctgcgctatcgtgtctattacaatggatgggacagtacgcccgatattccctcgagcggtgccggtattcatcatccggccggagatgccatgaagatttccatcctaaagaagactccggctctgaatacatggatctcctccagtggttccggagggactgacgatcacttctatttcaaatacgatcaaggtggtacggaaggaggatcgtccggttcttctctcttcaatcagaataagcacgtggtcggcacactgaccggaggtgccggcaattgtggcgggacggagttctacggcagactgaacagtcattggaacgagtatgcatccgatggcaatacgagccgcatggacatctatctggatccccaaaacaatggccagacgaccatcctcaacggaacgtatcgtgacggttataagcctttgccctctgtgccccggctattgttgcagtctacaggcgatcaggtcgaattgaattggacggctgttcctgccgatcaatatccatcatcttatcaggtcgaataccacatattccgaaatggaaaggaaatagctacgacaaaggagttgtcctattcggatgccatcgacgaaagtattatcggtagcggtatcattcgatacgaagtaagcgcacgcttcatttatccctcgccgttggatggagtggaatcttataaggatacggacaagacttctgccgaccttgccataggagacattcagaccaagctgaagccggacgtaacacctctccccggaggaggagtatcattaagctggaaagttcctttcttaagccagttggtttcccgattcggagaaagccccaatcctgtgttcaaaacctttgaagtgccctatgtttctgccgcagccgcacaaacccccaatcctcccgttggcgtagtcattgcagacaagtttatggccggtacatatcccgaaaaggctgctatcgctgccgtttatgtaatgccatccgctccggactctactttccacctcttcctcaagagcaacacaaacagaagattgcagaaggtgacaactccctccgattggcaggccggaacatggttgaggatcaatttggataagccgttcccggtgaataatgaccatatgctttttgccggtatcagaatgcctaataagtacaagctcaatcgtgctatccgttatgtaagaaatccggataaccttttctccattaccggtaagaagatttcatataacaacggagtctctttcgaaggctacggaataccctcgctcttgggctatatggctatcaaatatctggtggtaaataccgatgctccgaagatcgatatgtcgcttgtacaggagccttatgctaagggaacgaatgtggctccattccccgaattggtcggcatatatgtctataagaacggaacatttatcggcacacaggatccatccgtcacaacttattcggtttcagacggaacagagagcgatgaatacgaaataaaactggtatataagggatcgggcatttcgaatggcgttgctcagattgagaataacaatgctgtcgttgcatatccgtctgttgtaacagatcgtttcagcattaagaacgctcatatggttcacgctgccgccctctactcattggatggcaagcaggttcgttcttggaacaacctccgcaatggcgtgacattcagtgttcaaggacttacggccggtacttatatgctcgttatgcagacggcaaacggccctgtgagccaaaagatcgtgaagcag

SEQ ID NO: 57 - DNA, 2775 bp, Porphyromonas gingivalis
atggctatcatgatgaaaagtattgtttttagagcatttctaacgattttgctctcgtgggcagcgatcacgaatccgactgctcaagagatctcaggcatgaatgcatcctgtctggctgctccggctcaaccggatactatcttatatgaaagttttgagaatggacctgttcccaatggctggcttgagatagatgctgatgctgatggtgccacttggggaagcccatcaggctctttctctgtaccttacggacacaatggcctttgcacctactcccatatacgttccggtatctcaacagcgggcaactatctgattacacccaatatagaaggagccaaacgggtcaagtactgggtatgcaatcagtatagtaccaatccggaacattacgcagtaatggtatcgacaacggggactgccattgaagactttgttttgttgtttgatgattccataacagggaaaccgactcctcttgtatggcgtagacgaatcgtggacttaccggaagggaccaaatatattgcatggcgacattacaaagtcaccgactcacacacagaattcttgaaattggatgatgtcactgtgtataggtcgatcgaagggcccgaacctgctaccgacttcacagtaatcaatattggtcagaatgtgggacgattgacttggaactatccggaggattatcaaccggaaggaaaggggaatgaagagttgcagcttagcggctacaacatctatgcgaacggtacactactggcacaaataaaagatgtctccatactggagtatgtggacagcacttactctttgcgagacaatcccttgcaagtggagtactgcgttacagccgtttacgatgaaagcatagaatcttcgaccgtatgtggcacgctgcattacgccacggatgccatcctttatgaaaattttgagaatggacctgttcccaatggttggcttgtgatagacgctgatggagatggatttagctggggacactatttgaatgcatacgacgcttttcccggccataatggaggccattgctccttgtcggcttcttatgttccgggtataggcccggtgactcccgacaactatctgattacccccaaggttgaaggagccaaacgtgtcaagtactgggtaagcacgcaggatgccaattgggcagcggaacattacgcggtgatggcttcgacaacggggactgctgtcggagatttcgtcatattgttcgaagaaaccatgacagcgaagccgaccggcgcatggtatgaaagaaccatcaacttacctgaagggactaaatacatcgcatggcggcattacaactgtaccgatatatatttcttgaagttggacgatatcactgtattcgggactcctgcatcagagcccgaacctgttaccgatttcgttgtctcgcttattgaaaacaacaagggacgattaaagtggaattatcctaacggctacgaacccgataagactgatgataaagacccattgcagcttgccggctacaatatctatgcaaacggctcgctccttgttcacatacaagacccgactgttttggagtatatcgatgagacttattcttcacgagacgatcaggtggaagtggaatattgtgtcactgccgtttataacgacaatatcgagtcccaatcggtttgcgataagctgatttatgattctcaatcggacattatcttatatgaaggctttgaggccggaagtattcctgaaggctggttgttgattgatgctgatggcgacaatgttaattgggactattatccttggactatgtatggacatgacagtgagaagtgtattgcatccccttcgtacttaccgatgattggcgttttaactccggataactatttggttacacccagactcgaaggagccaagcttgtcaagtattgggtaagtgcgcaagatgctgtttattcggctgagcattatgctgtgatggtttctactacgggaactgctgttgaagattttgtcctcttgttcgaagagacaatgaccgctaaggctaacggtgcatggtatgagcgaactattacattgcctgcaggaacaaaatatattgcctggcggcattatgattgcaccgatatgtttttcttgctcttggatgacattacggtttatcgttctactgagactgttcccgagcctgttactgatttcgttgtctcgcttattgagaataacaagggtcgcctgaaatggaattatcctaacggctacgaacccgataagactgatgataaaaaaccattgcagcttaccggctacaacatctatgcaaatggctcgctccttgttcacatacaagacccgactgttttggagtatatcgatgagacttattcttcacgagacggtcaggtggaaatggaatattgtgtcactgccgtttataacgacaatatcgagtcccaatcggtttgcgataagctgaactatactatcacatccttggataatattcaatctgatacaagcttgaaaatatatcctaatccggcatcgtatgtggtaaggatagagggattgagtcggagcaagtcgacaatcgagttgtataatgcgctgggaatttgcatattaagggaagagactcattcagagaaaacggaaatcgatgtttcacgtctcaatgacggagtctacttgattaaagtagtcggtggaaataaaacaacaaccgaaaaggtagagataaagaggccg

SEQ ID NO: 58 - DNA, 2766 bp, Porphyromonas gingivalis
atgatgaaaagtattgtttttagagcatttctaacgattttgctctcgtgggcagcgatcacgaatccgactgctcaagagatctcaggcatgaatgcatcctgtctggctgctccggctcaaccggatactatcttatatgaaagttttgagaatggacctgttcccaatggctggcttgagatagatgctgatgctgatggtgccacttggggaagcccatcaggctctttctctgtaccttacggacacaatggcctttgcacctactcccatatacgttccggtatctcaacagcgggcaactatctgattacacccaatatagaaggagccaaacgggtcaagtactgggtatgcaatcagtatagtaccaatccggaacattacgcagtaatggtatcgacaacggggactgccattgaagactttgttttgttgtttgatgattccataacagggaaaccgactcctcttgtatggcgtagacgaatcgtggacttaccggaagggaccaaatatattgcatggcgacattacaaagtcaccgactcacacacagaattcttgaaattggatgatgtcactgtgtataggtcgatcgaagggcccgaacctgctaccgacttcacagtaatcaatattggtcagaatgtgggacgattgacttggaactatccggaggattatcaaccggaaggaaaggggaatgaagagttgcagcttagcggctacaacatctatgcgaacggtacactactggcacaaataaaagatgtctccatactggagtatgtggacagcacttactctttgcgagacaatcccttgcaagtggagtactgcgttacagccgtttacgatgaaagcatagaatcttcgaccgtatgtggcacgctgcattacgccacggatgccatcctttatgaaaattttgagaatggacctgttcccaatggttggcttgtgatagacgctgatggagatggatttagctggggacactatttgaatgcatacgacgcttttcccggccataatggaggccattgctccttgtcggcttcttatgttccgggtataggcccggtgactcccgacaactatctgattacccccaaggttgaaggagccaaacgtgtcaagtactgggtaagcacgcaggatgccaattgggcagcggaacattacgcggtgatggcttcgacaacggggactgctgtcggagatttcgtcatattgttcgaagaaaccatgacagcgaagccgaccggcgcatggtatgaaagaaccatcaacttacctgaagggactaaatacatcgcatggcggcattacaactgtaccgatatatatttcttgaagttggacgatatcactgtattcgggactcctgcatcagagcccgaacctgttaccgatttcgttgtctcgcttattgaaaacaacaagggacgattaaagtggaattatcctaacggctacgaacccgataagactgatgataaagacccattgcagcttgccggctacaatatctatgcaaacggctcgctccttgttcacatacaagacccgactgttttggagtatatcgatgagacttattcttcacgagacgatcaggtggaagtggaatattgtgtcactgccgtttataacgacaatatcgagtcccaatcggtttgcgataagctgatttatgattctcaatcggacattatcttatatgaaggctttgaggccggaagtattcctgaaggctggttgttgattgatgctgatggcgacaatgttaattgggactattatccttggactatgtatggacatgacagtgagaagtgtattgcatccccttcgtacttaccgatgattggcgttttaactccggataactatttggttacacccagactcgaaggagccaagcttgtcaagtattgggtaagtgcgcaagatgctgtttattcggctgagcattatgctgtgatggtttctactacgggaactgctgttgaagattttgtcctcttgttcgaagagacaatgaccgctaaggctaacggtgcatggtatgagcgaactattacattgcctgcaggaacaaaatatattgcctggcggcattatgattgcaccgatatgtttttcttgctcttggatgacattacggtttatcgttctactgagactgttcccgagcctgttactgatttcgttgtctcgcttattgagaataacaagggtcgcctgaaatggaattatcctaacggctacgaacccgataagactgatgataaaaaaccattgcagcttaccggctacaacatctatgcaaatggctcgctccttgttcacatacaagacccgactgttttggagtatatcgatgagacttattcttcacgagacggtcaggtggaaatggaatattgtgtcactgccgtttataacgacaatatcgagtcccaatcggtttgcgataagctgaactatactatcacatccttggataatattcaatctgatacaagcttgaaaatatatcctaatccggcatcgtatgtggtaaggatagagggattgagtcggagcaagtcgacaatcgagttgtataatgcgctgggaatttgcatattaagggaagagactcattcagagaaaacggaaatcgatgtttcacgtctcaatgacggagtctacttgattaaagtagtcggtggaaataaaacaacaaccgaaaaggtagagataaagaggccg

SEQ ID NO: 59 - DNA, 2763 bp, Porphyromonas gingivalis
atgaaaagtattgtttttagagcatttctaacgattttgctctcgtgggcagcgatcacgaatccgactgctcaagagatctcaggcatgaatgcatcctgtctggctgctccggctcaaccggatactatcttatatgaaagttttgagaatggacctgttcccaatggctggcttgagatagatgctgatgctgatggtgccacttggggaagcccatcaggctctttctctgtaccttacggacacaatggcctttgcacctactcccatatacgttccggtatctcaacagcgggcaactatctgattacacccaatatagaaggagccaaacgggtcaagtactgggtatgcaatcagtatagtaccaatccggaacattacgcagtaatggtatcgacaacggggactgccattgaagactttgttttgttgtttgatgattccataacagggaaaccgactcctcttgtatggcgtagacgaatcgtggacttaccggaagggaccaaatatattgcatggcgacattacaaagtcaccgactcacacacagaattcttgaaattggatgatgtcactgtgtataggtcgatcgaagggcccgaacctgctaccgacttcacagtaatcaatattggtcagaatgtgggacgattgacttggaactatccggaggattatcaaccggaaggaaaggggaatgaagagttgcagcttagcggctacaacatctatgcgaacggtacactactggcacaaataaaagatgtctccatactggagtatgtggacagcacttactctttgcgagacaatcccttgcaagtggagtactgcgttacagccgtttacgatgaaagcatagaatcttcgaccgtatgtggcacgctgcattacgccacggatgccatcctttatgaaaattttgagaatggacctgttcccaatggttggcttgtgatagacgctgatggagatggatttagctggggacactatttgaatgcatacgacgcttttcccggccataatggaggccattgctccttgtcggcttcttatgttccgggtataggcccggtgactcccgacaactatctgattacccccaaggttgaaggagccaaacgtgtcaagtactgggtaagcacgcaggatgccaattgggcagcggaacattacgcggtgatggcttcgacaacggggactgctgtcggagatttcgtcatattgttcgaagaaaccatgacagcgaagccgaccggcgcatggtatgaaagaaccatcaacttacctgaagggactaaatacatcgcatggcggcattacaactgtaccgatatatatttcttgaagttggacgatatcactgtattcgggactcctgcatcagagcccgaacctgttaccgatttcgttgtctcgcttattgaaaacaacaagggacgattaaagtggaattatcctaacggctacgaacccgataagactgatgataaagacccattgcagcttgccggctacaatatctatgcaaacggctcgctccttgttcacatacaagacccgactgttttggagtatatcgatgagacttattcttcacgagacgatcaggtggaagtggaatattgtgtcactgccgtttataacgacaatatcgagtcccaatcggtttgcgataagctgatttatgattctcaatcggacattatcttatatgaaggctttgaggccggaagtattcctgaaggctggttgttgattgatgctgatggcgacaatgttaattgggactattatccttggactatgtatggacatgacagtgagaagtgtattgcatccccttcgtacttaccgatgattggcgttttaactccggataactatttggttacacccagactcgaaggagccaagcttgtcaagtattgggtaagtgcgcaagatgctgtttattcggctgagcattatgctgtgatggtttctactacgggaactgctgttgaagattttgtcctcttgttcgaagagacaatgaccgctaaggctaacggtgcatggtatgagcgaactattacattgcctgcaggaacaaaatatattgcctggcggcattatgattgcaccgatatgtttttcttgctcttggatgacattacggtttatcgttctactgagactgttcccgagcctgttactgatttcgttgtctcgcttattgagaataacaagggtcgcctgaaatggaattatcctaacggctacgaacccgataagactgatgataaaaaaccattgcagcttaccggctacaacatctatgcaaatggctcgctccttgttcacatacaagacccgactgttttggagtatatcgatgagacttattcttcacgagacggtcaggtggaaatggaatattgtgtcactgccgtttataacgacaatatcgagtcccaatcggtttgcgataagctgaactatactatcacatccttggataatattcaatctgatacaagcttgaaaatatatcctaatccggcatcgtatgtggtaaggatagagggattgagtcggagcaagtcgacaatcgagttgtataatgcgctgggaatttgcatattaagggaagagactcattcagagaaaacggaaatcgatgtttcacgtctcaatgacggagtctacttgattaaagtagtcggtggaaataaaacaacaaccgaaaaggtagagataaagaggccg

SEQ ID NO: 60 - DNA, 972 bp, Porphyromonas gingivalis
atgtgcctcgaacccataattgctccgatttcatccgagttgctcgagcaggagctgactgccgatcgttttctgcggatgacaaacaaagccggcaatgagatctatgtttttacggccgaagaagctccgcattgcatgaaagaagtaggccgactgcgagaagaagcctttcggcattatggcggaggtactggcaaggcgatcgatatagacgagttcgacaccatgcccgggagctacaaacagctgatcgtatgggatccgcaaaacaaggctatactcggaggctaccgctttatctatgggcgggacgttgctttcgataccgatggcaagcctttgctggcaacggcagagatgtttcgcttcagtgatgcttttttgcacgattatctcccctacacagtcgaattgggacgttcgttcgtgtcgctccagtaccaatcgacacggatgggcacaaaggccatttttgtgctggacaatctttgggacggtatcggagcactcactgtagtcaatccagaggcactctatttctatggcaaggtgaccatgtacaaagactatgatcggcgagctcgcaatctgatcctgtattttcttcgcaagcacttctccgatccggaaggcttggtcaagcctattcatcccctaccgatagagatcagtgcggaggacgaagccttgttctcctcatccgactttgacaccaattacaagactctcaatatagaagtgcgcaagctgggtatcaatatccctcctctcgtgagtgcatatatagctttgtctccggagatgcgtgttttcggcactgcagtgaatgagtctttcggagaggtggaggaaaccggcatattcattgctgtgggtaagatcctggaagagaaaaaacaacggcacatagagagcttcatcctcagccggaacgaaaaaaaaggtctcgacagtagcaatggccgatca

SEQ ID NO: 61 - DNA, 3678 bp, Porphyromonas gingivalis
  misc_feature (2949)..(2949): n is a, c, g, or t
atgatgaaacgatatacaataattcttgcagtttttcttttattctgcacggtatttacctttcaaataaaagctcgcccttatgaaagatttgcagatgtagagaagccttggattcagaaacattcaatggattctaaattggtgcctgcaaataagggtaacttaattcaagctgaaattgtataccaatctgtttctgaacatagtgacttagttatttcacctgtgaacgaaataaggcctgcaaatcgtttcccttcgcataggaagtctttttttgcagaaaatctacgggcatctccccccgtagttcccgttgccgtcgacaagtatgcggtaccggttgccaatccaatggatcctgaaaatcccaatgcctgggatgtgacgctaaaaatcactactaaagcggtaacagtacctgtcgatgtggtgatggttatcgaccagtcttcgtcaatgggagggcaaaacattgccagattaaagtctgccattgcatcgggacagcgttttgtgaaaaaaatgttgcctaaggggacggctacagaaggggtgcgtatcgctcttgtgagttatgaccatgagcctcatcgcttatctgattttaccaaagacactgcttttctctgtcaaaaaatccgggctttgactcctatttggggaacacatacccagggggggcttaaaatggcgagaaacattatggccacttctactgctgtggataagcatatcatattgatgtctgacgggttagcgacggagcagtatcctgttaaaaatgtaactactgcagacttcattggcaaaactggaaatgcgaatgatcccattgatttggttatacaaggagcaattaatttccctacaaattatgtttccaacaatccatctacacctcttaccccaaattatccaactcattcttctaaagttggacggagaaatctgccggaatccaaattcgattatagtaatctgagtgcaaggattacttttgatggtgttgctggcgcattggtctatgaaccgaggtttcctcatccctattattattatttcccttgtaacgctgctatcaatgaggctcagtttgcgaaaaactctggttatacaatccatactattggctatgacctgggagattttgccttggccaacaattcgttgaaactaaccgctacagacgagaatcacttctttacggcgacaccggccaatttagctgcagcgtttgataatattgcccaaactattaatataggtatacagaggggggaggtgacggactttgtagctcctggtttcatcgttaaaaatctgacgcaatcgggagatgttactcatttgctaaatgtttcaaatggaacggtgcactatgatgtctctactaaaaaactgacatggactactggtactatcctgagctcatcagaagctaccataacttatcgtatttatgccgatttggattatatacagaacaatgatattccggtaaatactacttctgctatcggcccggatcttggtggattcgataccaataccgaggcaaaattgacctataccaattccaatggcgaaccgaatcagcagttaattttcccacgtccgacggttaagttaggttatggtgttattaagcggcactatgtattggtaaataaagacggtcaacccatacaggcaaatggaacagttgtcagttccctaagcgaggctcatgttctacagtcacaagatttctttttgccctcaggtggaggtcatattgttcccaaatggataaagttggacaaaacgaccgaagcattacagtactattccgtaccgccgactaacacggtcatcactactgccgatggtaaacgttatcgttttgtcgaagtcccaggctccacgccgaatccgggccaaatcggtatcagttggaaaaaaccggcaggaaacgcttacttcgcttacaagctcctcaattattggatgggaggaacaacagaccaacagagtgaatgggatgtgacgtccaattggacaggagcccaagtaccgctcacaggagaagatgtagagtttgcaacgacagaaaatttcggttctccggcggtagccgatttgcatgtcccgacaaccaaccccaaaattatcggtaaccttatcaataattccgacaaggatttagttgttaccacaagcagtcaattgacgatcaacggcgtggttgaggataacaatccgaatgtcggtacgatcgtcgtgaagtcgtcgaaagacaatcctacggggacattgctttttgccaatccgggctataatcaaaatgtaggggggaccgtcgagttttacaatcagggatatgattgtgccgattgtggtatgtatcgcaggagctggcagtatttcggtatccctgtcaatgaatcaggttttccaattaatgatgtgggcggaaacgagaccgtcaaccaatgggttgagcctttcaatggcgataagtggcggccagcaccttatgcacctgatacagagcttcaaaaattcaagggctaccagatcacgaatgacgtgcaggcacagcctacgggagtttacagcttcaagggtatgatttgtgtgtgcgatgccttcctgaatctgacacgcacgtccggtgtcaactactcgggcgccaacttgatcggcaactcatacactggagccatcgacatcaagcagggtattgtcttcccgccggaagtcgagcagacggtgtatctgttcaacacgggaacacgcgaccagtggcgtaagcttaatggaagcacggtttcaggctatcgagccggtcagtacctctctgtacctaagaatacagcgggtcaggacaatcttccggatcgtattccatcgatgcattccttcttggtgaagatgcagaacggagcgtcttgtacgttgcanatcttgtacgataagctgctcaagaacacgactgtaaacaacggtaatggtacgcagatcacatggcgatccggcaactccggatcggcgaatatgccgtcacttgtgatggatgttcttggtaacgagtcggccgaccgtttgtggatctttaccgatgggggtctttctttcggattcgacaacggctgggatggtcgcaagctgactgaaaaaggtttgtcacaactttatgcgatgtctgacatcggtaatgataaattccaggttgcaggggttccggagttgaataacctgctgatcggcttcgatgcggataaggatggtcaatacacgttggagtttgctctttcggatcattttgcgaaaggggctgtttacctgcacgatcttcagtcaggagccaaacaccgtattacgaattctacgtcgtattcattcgatgccaagcggggagattccggggctcgtttccgcttgtcatatggatgtgatgagaacgtagatgattcgcatgtcgtgagtacaaatggccgtgaaattataattctgaatcaagatgctcttgactgcactgtaaccttattcacaatagaaggtaagcttcttcgccgcttgaaagtattagctggtcatagagaagtcatgaaagtgcagaccggaggggcctatattgtgcatcttcaaaatgctttcactaatgatgtgcataaggtgcttgttgagtat

SEQ ID NO: 62 - DNA, 3675 bp, Porphyromonas gingivalis
  misc_feature (2946)..(2946): n is a, c, g, or t
atgaaacgatatacaataattcttgcagtttttcttttattctgcacggtatttacctttcaaataaaagctcgcccttatgaaagatttgcagatgtagagaagccttggattcagaaacattcaatggattctaaattggtgcctgcaaataagggtaacttaattcaagctgaaattgtataccaatctgtttctgaacatagtgacttagttatttcacctgtgaacgaaataaggcctgcaaatcgtttcccttcgcataggaagtctttttttgcagaaaatctacgggcatctccccccgtagttcccgttgccgtcgacaagtatgcggtaccggttgccaatccaatggatcctgaaaatcccaatgcctgggatgtgacgctaaaaatcactactaaagcggtaacagtacctgtcgatgtggtgatggttatcgaccagtcttcgtcaatgggagggcaaaacattgccagattaaagtctgccattgcatcgggacagcgttttgtgaaaaaaatgttgcctaaggggacggctacagaaggggtgcgtatcgctcttgtgagttatgaccatgagcctcatcgcttatctgattttaccaaagacactgcttttctctgtcaaaaaatccgggctttgactcctatttggggaacacatacccagggggggcttaaaatggcgagaaacattatggccacttctactgctgtggataagcatatcatattgatgtctgacgggttagcgacggagcagtatcctgttaaaaatgtaactactgcagacttcattggcaaaactggaaatgcgaatgatcccattgatttggttatacaaggagcaattaatttccctacaaattatgtttccaacaatccatctacacctcttaccccaaattatccaactcattcttctaaagttggacggagaaatctgccggaatccaaattcgattatagtaatctgagtgcaaggattacttttgatggtgttgctggcgcattggtctatgaaccgaggtttcctcatccctattattattatttcccttgtaacgctgctatcaatgaggctcagtttgcgaaaaactctggttatacaatccatactattggctatgacctgggagattttgccttggccaacaattcgttgaaactaaccgctacagacgagaatcacttctttacggcgacaccggccaatttagctgcagcgtttgataatattgcccaaactattaatataggtatacagaggggggaggtgacggactttgtagctcctggtttcatcgttaaaaatctgacgcaatcgggagatgttactcatttgctaaatgtttcaaatggaacggtgcactatgatgtctctactaaaaaactgacatggactactggtactatcctgagctcatcagaagctaccataacttatcgtatttatgccgatttggattatatacagaacaatgatattccggtaaatactacttctgctatcggcccggatcttggtggattcgataccaataccgaggcaaaattgacctataccaattccaatggcgaaccgaatcagcagttaattttcccacgtccgacggttaagttaggttatggtgttattaagcggcactatgtattggtaaataaagacggtcaacccatacaggcaaatggaacagttgtcagttccctaagcgaggctcatgttctacagtcacaagatttctttttgccctcaggtggaggtcatattgttcccaaatggataaagttggacaaaacgaccgaagcattacagtactattccgtaccgccgactaacacggtcatcactactgccgatggtaaacgttatcgttttgtcgaagtcccaggctccacgccgaatccgggccaaatcggtatcagttggaaaaaaccggcaggaaacgcttacttcgcttacaagctcctcaattattggatgggaggaacaacagaccaacagagtgaatgggatgtgacgtccaattggacaggagcccaagtaccgctcacaggagaagatgtagagtttgcaacgacagaaaatttcggttctccggcggtagccgatttgcatgtcccgacaaccaaccccaaaattatcggtaaccttatcaataattccgacaaggatttagttgttaccacaagcagtcaattgacgatcaacggcgtggttgaggataacaatccgaatgtcggtacgatcgtcgtgaagtcgtcgaaagacaatcctacggggacattgctttttgccaatccgggctataatcaaaatgtaggggggaccgtcgagttttacaatcagggatatgattgtgccgattgtggtatgtatcgcaggagctggcagtatttcggtatccctgtcaatgaatcaggttttccaattaatgatgtgggcggaaacgagaccgtcaaccaatgggttgagcctttcaatggcgataagtggcggccagcaccttatgcacctgatacagagcttcaaaaattcaagggctaccagatcacgaatgacgtgcaggcacagcctacgggagtttacagcttcaagggtatgatttgtgtgtgcgatgccttcctgaatctgacacgcacgtccggtgtcaactactcgggcgccaacttgatcggcaactcatacactggagccatcgacatcaagcagggtattgtcttcccgccggaagtcgagcagacggtgtatctgttcaacacgggaacacgcgaccagtggcgtaagcttaatggaagcacggtttcaggctatcgagccggtcagtacctctctgtacctaagaatacagcgggtcaggacaatcttccggatcgtattccatcgatgcattccttcttggtgaagatgcagaacggagcgtcttgtacgttgcanatcttgtacgataagctgctcaagaacacgactgtaaacaacggtaatggtacgcagatcacatggcgatccggcaactccggatcggcgaatatgccgtcacttgtgatggatgttcttggtaacgagtcggccgaccgtttgtggatctttaccgatgggggtctttctttcggattcgacaacggctgggatggtcgcaagctgactgaaaaaggtttgtcacaactttatgcgatgtctgacatcggtaatgataaattccaggttgcaggggttccggagttgaataacctgctgatcggcttcgatgcggataaggatggtcaatacacgttggagtttgctctttcggatcattttgcgaaaggggctgtttacctgcacgatcttcagtcaggagccaaacaccgtattacgaattctacgtcgtattcattcgatgccaagcggggagattccggggctcgtttccgcttgtcatatggatgtgatgagaacgtagatgattcgcatgtcgtgagtacaaatggccgtgaaattataattctgaatcaagatgctcttgactgcactgtaaccttattcacaatagaaggtaagcttcttcgccgcttgaaagtattagctggtcatagagaagtcatgaaagtgcagaccggaggggcctatattgtgcatcttcaaaatgctttcactaatgatgtgcataaggtgcttgttgagtat

SEQ ID NO: 63 - DNA, 1173 bp, Porphyromonas gingivalis
atgattatcaagaaaatgctgaaaaataaattggcccccttggccatactgttcctttttgctccaaaggctatgaaggctcaggagcaactgaatgtggtacacacctctgtgccatcgctgaatatcagtccggatgcacgtgcggccggtatgggggatataggtgtggcaacgacgccggatgcgtattcacagtattggaatccgagtaaatatgctttcatggatacgaaagccggtattagcttctcatatacaccctggctgtccaagctggtcaatgatattgccctgatgcagatgaccggtttctacaaattgggaacagacgagaatcaggctattagtgcttctctgcgttatttcacattaggaaagttggagactttcgacgaattgggcgaatccatgggagaggcccatcccaatgaatttgctgtcgatttgggctatagccgccagttgtcggagaacttctccatggctgttgcactgcgttacatccgctcagaccaaagcactcacaacaccggagagaatcaggccggaaatgcctttgcggcggatatagccggttatttgcagaagtatgtgctactgggtaatgcggagagcttgtggtcgttgggtttcaacgtaaagaatatcggaacgaagatctcctatgacggaggtgtcacgagttttttcatccctacttcgttgaatctcgggacggggctgttgtatccgatcgatgactataacagcatcaatttcaaccttgaacttagcaagctgcttgtacccactcctcctatcatggatcaaaacgatcaggccgggtatgaggctgcactcaagaaatatcaggaaacttcttcgatcagcggtatattctcttctttcggtgatgcgccgggaggactcaaggaagaattccgtgagattacatggggacttggggctgaatatagctatgacgataaattttttgttcgtgccggatattcatacctgcaccccaccaaaggcaatttgcagtacttcacggccggtgccggcttcaaaatgaacatattccgtatcgatgcttcctacctgttgtctacgatccagagtaatccgttggatcagactctgcggtttacgcttgctttcgatatggatggattgcgcaatttgttccac

SEQ ID NO: 64 - DNA, 1338 bp, Porphyromonas gingivalis
atgaaaacaacagttcaacaaattattctgtgcctggctttaatgatgtcaggtgtattgggcggaaacgcacagagcttttgggaagaaatagctcctccttttatcagtaatgagcctaacgtcaagtatataattcccaatatggggattgattcaaagggaacaatctatgtaaccgtgacaaaaaggattcagcagggagcaaattatacttctgagcaattgggtatgtactatcgaccattaggtgataatgaacagtggtggaaacatgatccgtattttgatgacaagatagttgcggatattcagacagatgcatatggcagagtttatgtatgtacgacttcttctcgagatcaagagtatcaactttatataaacgagcagaacgaatggaggtgtatattcaaaacttctgtgtctacatatgagcatggtatggctgtttttcgctcttcgacaggggtgacttatataggtaccaggcatcacatcttcgcatcaggtgtaaatgatttcgagttcaacactatctatgaagactctacacctatgagctgtcgctttgcagaggctacgaatagtggcaccatctatctggcattgatgcatgaaaccacaatgtctacgactatccttacttatcaaaacggtgagttcgtcgatatctcggaaagtgaattgagtaactcgattattgcatccatgtgctctaataaagaaggtgatataatagctcttgttacttcatatacaggatttatgagtggaacccttgcgatcagaaaagcagatgaaggcaaatggcaacttgttggcggagatatacagaatgcgatcgttcaaaatatatgcatgatggacgacaacaagattgcttgtgaagtcttcgggactcctaacggagtagatggtcggacaagggtttgtgtttctgacgcatctgtctttgattttgagtggtatgaagatgaaatatacggaggcctgatatttgacactttcttctatagcccttgggacaaacttctttatgcgaaatttggtgggattatgctcaggagtaaagagtcttttataacctctttcatttctccgacagttgtacaaggagtggatgtctatactttggccgggaagataaggatcgaaagtgaaactccggtgtctgaggtgttgcttttcgacctggctggcaggatggtacttcggcaaaccattgataataaaatctattcggacatagatactaacggactaaagcgaagcggtatttacgtagtctcggtgcggctctcttccggacaggtattcagtcataaggtgcaggta

SEQ ID NO: 65 - DNA, 1797 bp, Porphyromonas gingivalis
atggaaaacttaaagaacattcagcccagagaggatttcaactgggaagagtttgaggccggtggcgtccatgctgccgtgagtcgtcaggagcaggaagctgcttatgacaaaacgctcaataccatcaaggaaaaggaagtggtaatgggtagggtaactgctatcaacaagcgtgaagtggttatcaatgtagggtacaaatcggaaggtgtggtacctgcaacagaattccgctacaatcccgaactcaaagtgggagacgaagtggaagtttatatcgagaatcaggaagataagaagggccagctcgtcttgtctcaccgcaagggtcgtgccgctcgctcttgggagcgcgtgaacgaggctctcgaaaaagacgaaatcgtaaagggctatgtgaagtgtcgtaccaagggtggtatgatcgtcgatgtattcggtatcgaggctttcctcccgggatcacagatcgacgtgcgccccattcgcgactacgatgcattcgttgagaagacgatggagttcaagattgtgaaaatcaatcaagaatataagaatgtagttgtttcccacaaggtgctcatcgaagcagagctcgaacaacagaagaaagaaatcatcggcaagctcgaaaaagggcaggtactcgaaggtatcgtcaagaatattacttcttacggagtatttatcgacctcggtggagtggatggtcttatccatatcactgacctttcatggggtcgtgtggctcatccggaagaaatcgtacagctggatcagaagatcaatgtcgttatcctcgactttgatgaagatcgcaagcgtatcgctctcggactcaaacagctgatgcctcatccttgggatgctctcgacagcgagcttaaggtaggcgataaggtgaagggtaaagttgtggtgatggcagattacggtgctttcgttgagattgcacagggcgttgagggtcttatccacgtaagcgaaatgtcatggacacagcacttgcgttctgctcaggacttcctgcatgtaggcgacgaagtggaagccgtgatcctgacgctcgaccgcgaagaacgcaaaatgtcgctcggtctgaagcaactcaagccggatccttgggctgatatcgaaactcgtttccctgtaggctctcgtcaccatgctcgtgttcgcaacttcaccaatttcggtgtattcgttgagatcgaagagggcgtagatggccttatccatatttccgacctttcttggacgaagaagatcaaacaccccagcgagtttacggaagtaggtgctgatatcgaagttcaggtaatcgagatcgacaaggaaaaccgtcgtctcagcttgggtcacaaacagttggaagagaatccttgggatgtattcgagacggtattcactgtaggatctatccacgaaggaacggtaatcgaagtgatggacaagggtgctgtcgtttctctgccttacggtgtggaaggttttgccactccgaagcacatggtgaaggaagatggctcacaggctgtactcgaagagaagttacctttcaaggttattgagttcaataaggatgccaagcgaatcattgtatctcatagccgtgtattcgaagatgagcagaaaatggctcagcgtgaagccaatgcagagcgtaaggctgaagccaaagcggctcagaaagaagctgctgccgaagctgccaatcctgcacaggctgtagagaaagccactctcggagacctcggcgagctggccgctttgaaagaaaagctttcagaaaac

SEQ ID NO: 66 - DNA, 1650 bp, Porphyromonas gingivalis
atgggtagggtaactgctatcaacaagcgtgaagtggttatcaatgtagggtacaaatcggaaggtgtggtacctgcaacagaattccgctacaatcccgaactcaaagtgggagacgaagtggaagtttatatcgagaatcaggaagataagaagggccagctcgtcttgtctcaccgcaagggtcgtgccgctcgctcttgggagcgcgtgaacgaggctctcgaaaaagacgaaatcgtaaagggctatgtgaagtgtcgtaccaagggtggtatgatcgtcgatgtattcggtatcgaggctttcctcccgggatcacagatcgacgtgcgccccattcgcgactacgatgcattcgttgagaagacgatggagttcaagattgtgaaaatcaatcaagaatataagaatgtagttgtttcccacaaggtgctcatcgaagcagagctcgaacaacagaagaaagaaatcatcggcaagctcgaaaaagggcaggtactcgaaggtatcgtcaagaatattacttcttacggagtatttatcgacctcggtggagtggatggtcttatccatatcactgacctttcatggggtcgtgtggctcatccggaagaaatcgtacagctggatcagaagatcaatgtcgttatcctcgactttgatgaagatcgcaagcgtatcgctctcggactcaaacagctgatgcctcatccttgggatgctctcgacagcgagcttaaggtaggcgataaggtgaagggtaaagttgtggtgatggcagattacggtgctttcgttgagattgcacagggcgttgagggtcttatccacgtaagcgaaatgtcatggacacagcacttgcgttctgctcaggacttcctgcatgtaggcgacgaagtggaagccgtgatcctgacgctcgaccgcgaagaacgcaaaatgtcgctcggtctgaagcaactcaagccggatccttgggctgatatcgaaactcgtttccctgtaggctctcgtcaccatgctcgtgttcgcaacttcaccaatttcggtgtattcgttgagatcgaagagggcgtagatggccttatccatatttccgacctttcttggacgaagaagatcaaacaccccagcgagtttacggaagtaggtgctgatatcgaagttcaggtaatcgagatcgacaaggaaaaccgtcgtctcagcttgggtcacaaacagttggaagagaatccttgggatgtattcgagacggtattcactgtaggatctatccacgaaggaacggtaatcgaagtgatggacaagggtgctgtcgtttctctgccttacggtgtggaaggttttgccactccgaagcacatggtgaaggaagatggctcacaggctgtactcgaagagaagttacctttcaaggttattgagttcaataaggatgccaagcgaatcattgtatctcatagccgtgtattcgaagatgagcagaaaatggctcagcgtgaagccaatgcagagcgtaaggctgaagccaaagcggctcagaaagaagctgctgccgaagctgccaatcctgcacaggctgtagagaaagccactctcggagacctcggcgagctggccgctttgaaagaaaagctttcagaaaac

SEQ ID NO: 67 - DNA, 1374 bp, Porphyromonas gingivalis
atgatcgtcgatgtattcggtatcgaggctttcctcccgggatcacagatcgacgtgcgccccattcgcgactacgatgcattcgttgagaagacgatggagttcaagattgtgaaaatcaatcaagaatataagaatgtagttgtttcccacaaggtgctcatcgaagcagagctcgaacaacagaagaaagaaatcatcggcaagctcgaaaaagggcaggtactcgaaggtatcgtcaagaatattacttcttacggagtatttatcgacctcggtggagtggatggtcttatccatatcactgacctttcatggggtcgtgtggctcatccggaagaaatcgtacagctggatcagaagatcaatgtcgttatcctcgactttgatgaagatcgcaagcgtatcgctctcggactcaaacagctgatgcctcatccttgggatgctctcgacagcgagcttaaggtaggcgataaggtgaagggtaaagttgtggtgatggcagattacggtgctttcgttgagattgcacagggcgttgagggtcttatccacgtaagcgaaatgtcatggacacagcacttgcgttctgctcaggacttcctgcatgtaggcgacgaagtggaagccgtgatcctgacgctcgaccgcgaagaacgcaaaatgtcgctcggtctgaagcaactcaagccggatccttgggctgatatcgaaactcgtttccctgtaggctctcgtcaccatgctcgtgttcgcaacttcaccaatttcggtgtattcgttgagatcgaagagggcgtagatggccttatccatatttccgacctttcttggacgaagaagatcaaacaccccagcgagtttacggaagtaggtgctgatatcgaagttcaggtaatcgagatcgacaaggaaaaccgtcgtctcagcttgggtcacaaacagttggaagagaatccttgggatgtattcgagacggtattcactgtaggatctatccacgaaggaacggtaatcgaagtgatggacaagggtgctgtcgtttctctgccttacggtgtggaaggttttgccactccgaagcacatggtgaaggaagatggctcacaggctgtactcgaagagaagttacctttcaaggttattgagttcaataaggatgccaagcgaatcattgtatctcatagccgtgtattcgaagatgagcagaaaatggctcagcgtgaagccaatgcagagcgtaaggctgaagccaaagcggctcagaaagaagctgctgccgaagctgccaatcctgcacaggctgtagagaaagccactctcggagacctcggcgagctggccgctttgaaagaaaagctttcagaaaac

SEQ ID NO: 68 - DNA, 1278 bp, Porphyromonas gingivalis
atggagttcaagattgtgaaaatcaatcaagaatataagaatgtagttgtttcccacaaggtgctcatcgaagcagagctcgaacaacagaagaaagaaatcatcggcaagctcgaaaaagggcaggtactcgaaggtatcgtcaagaatattacttcttacggagtatttatcgacctcggtggagtggatggtcttatccatatcactgacctttcatggggtcgtgtggctcatccggaagaaatcgtacagctggatcagaagatcaatgtcgttatcctcgactttgatgaagatcgcaagcgtatcgctctcggactcaaacagctgatgcctcatccttgggatgctctcgacagcgagcttaaggtaggcgataaggtgaagggtaaagttgtggtgatggcagattacggtgctttcgttgagattgcacagggcgttgagggtcttatccacgtaagcgaaatgtcatggacacagcacttgcgttctgctcaggacttcctgcatgtaggcgacgaagtggaagccgtgatcctgacgctcgaccgcgaagaacgcaaaatgtcgctcggtctgaagcaactcaagccggatccttgggctgatatcgaaactcgtttccctgtaggctctcgtcaccatgctcgtgttcgcaacttcaccaatttcggtgtattcgttgagatcgaagagggcgtagatggccttatccatatttccgacctttcttggacgaagaagatcaaacaccccagcgagtttacggaagtaggtgctgatatcgaagttcaggtaatcgagatcgacaaggaaaaccgtcgtctcagcttgggtcacaaacagttggaagagaatccttgggatgtattcgagacggtattcactgtaggatctatccacgaaggaacggtaatcgaagtgatggacaagggtgctgtcgtttctctgccttacggtgtggaaggttttgccactccgaagcacatggtgaaggaagatggctcacaggctgtactcgaagagaagttacctttcaaggttattgagttcaataaggatgccaagcgaatcattgtatctcatagccgtgtattcgaagatgagcagaaaatggctcagcgtgaagccaatgcagagcgtaaggctgaagccaaagcggctcagaaagaagctgctgccgaagctgccaatcctgcacaggctgtagagaaagccactctcggagacctcggcgagctggccgctttgaaagaaaagctttcagaaaac

SEQ ID NO: 69 - DNA, 1620 bp, Porphyromonas gingivalis
atgaagacaaaagttttacgcaaattcgtggtggcggctttcgccgtcgcaaccctctgtcctctcgcccaagcgcagacgatgggaggagatgatgtcaaggtggtccagtacaatcaggaaaaactggtacaaacgaggatgagtgtggcggacaacggatggatctatgtaatgacccacagtggatacgacaccggcaatagcaatgtgaagatcttccgctccaaagaccaaggtgccacataccaaaagttgagggattgggatccatcggatgattatcagtttcaagacttcgatatcgtggtaacgggtaagaatgaatccgacatcaagatttggtcggtagagctcatgaataagcccggaggatataagagtagagttgcggtcttcagtcgcgatgccaacgcgcagaatgcgaaactcgtgtataaggaagacttctccaatgtgcagttgtacgatgtggatatagcctccaactatcgttcgccttcttctcttaacaatggtggcaacccttttgctttggctttcgcttacaccggcttcaacaatacgcacaaaataagttttgtggactatgtgttctctctgaatggagggcaaaatttcaataaaaacttactcttcagtcaagatggagagaagaaaattgacaaggtggatctctcattgggtagcacctctgaatccatgggtcacaatgcctggccgctaatgggtgtggtattcgaaatgaataaacaagggggaaaaagcgatatcggtttcttgtcgaactttgtcgacaatgatcccgaatttcagtggtcaggccctataaaagtgagtgaaagcgacatgtcgttcagccccaaaatccaaatgttgctggacgaggataacaatacgatcaatggggagagttgccacaacttcatgattacgtacagcgattatgattctgaatattcggattgggacattcggtatgtatatcccaagaaatcgttcaagtatgaaaaaggaaaaactccgactatggatgatctggtggaagctttccttacagcttcgtaccagagtgagaccaactcggggctggggtatgacaagaacgccaatcactacctgattacatatgccaaaaaagaagagaacggtacgaacacgctgaaataccgctgggccaattatgacaagattcataacaaagatttgtggagcgacacatttacgtatacatcatctgccaatgctctctacacacctcaagtagacatcaatccgaccaagggtctcgtgtgctggtcatgggtggaatatctgccgggcaaacggatcgtttggtctgatacgcagtggacccatgccaacggtgtagaagacatcgtaatgcaagaaggcagcatgaagctctacccgaatccggctcaagaatatgctgtgattagcctgccgacggcagcaaactgcaaggctgttgtttacgatatgcagggcagagtagtcgctgaggcttctttctccggcaacgaatacaggctgaacgtgcagcacttggctaagggtacgtacatactcaaggtcgtatccgatacggagcgtttcgtagagaagctcatcgtggaa

SEQ ID NO: 70 - DNA, 3474 bp, Porphyromonas gingivalis
atgaaacgaatacttccaatagtcgcattcctttctctcttccttgcccttgctttgcctgcgaaagcgcaacgagctatggggaagacggccgaccgttcgctaatggcttcgggacattgggtcaagatacgtgtcgatgcaagtggagtgtatcgccttacggacgaacagctccgtgccaatggcttctccgatccgtccaaggtaggtgtgttcggttatggtggaggggtgcttcccgaagatctgagccggatcacgacagacgatttgcctccggtaccggtactccgtcagggcaatgcgctgtatttctatgccgtgggcccggtgacatggttctacaatccggccaaaaccaccatggagcatacggtgaatacatacagtacgcatggctactacttcctgtcggatgctgccggagcacctttgcagatgtcccaatatacgggtggaggtgcgtcggccgaggctttgatcgactactacgatgagctgatgctccatgaacaggaattgtattcgcccaaagaatcgggacgagatctgtatggcgagtctttcagtgcagtcaatacgcgtacggtcaagttccctttgaggggcaacacccgctcgtctggcgaactcggtaccgtattctcatacatagccaaggccagatcggccggtggcggccgtgagatgtcgctctcggcgaatggcattctgatcttcagcgatcctttttccatgacatcgaatgaagtctccaattcctatttggccggcaagaagcgtcgtctctatcacagtacgccgatgaacagcttggtcaatgagttgcgcttggacgcgaactatagcatgacaggagatgcggtcaatctggatttcatagaggtggctacacagaacgacctccggtacgatggcgcacccatgcatatcaggcggttttccaatttgcccgttttggggggcgagtcctgccggttcgttatcagtgaggtgccggagtctctggtggttttgcaggccaattcttccctgacagcatcgcttgttcccgttaagactgtcggggataagaccattgagttcgtggctccgccgaagggtcaggatcgtaggactatcaatacgttttatgccgtggacttgtcacaggcttctgctccggagatcctcggagcggtacccaatcaaaacctgcatggagaggaaatccctgatctgatcattgtctctactcaggcgctcctccttgaggctgatcgactggccacctatcgtagagagaaaaacgggctgaaggttttggtcgtgttgcaggaacaggtgttcaacgagttttcgggtggaactcccgatgctacagcataccgcctctttgccaaaatgttctacgacagatggaaggcaaatgcacctgtgggagagaccttcccgatgcaaatgcttctcttcggtgatggggctcatgacaacaggaaggtctccgtagcttggcagaaaccgtatctccaacaaacggagttcttgctgacattccaagccgtcaattcgacgaacgtaaacagttatgtgacggatgattacttcggcttgctggatgatcagccggcctcggtcaatatcggttggcgcaattataatatggctgtagggcgattccccgtacgtactccggccgaagctcgcatcgcagtggacaagaccatccgatatgaggaggatcgagagagtggtgcctggcgtattcgtgcctgttttgcggcagacaacggggacaagcacgcaaccgagacttcccgtttgatcgataccgtcaagcgttatgctcctgccatcatgccggtacgcgcctttcaggacgtatatccgcatgtcatcgagaacgggttgcacagcattccgggtgcaaagaaaaagatgctggaaacccttcagtcgggtattatcctgcttaattatgctggtcatggcggtcctgccggatggtcggacgagcatttgctgacgctcaacgatatacacaaattcaattataagcatatgcccatttggattactgccacgtgcgactttgccaactatgacagtcagacgacctcggcaggggaggaggttttcctccatgagaagagtggcactccgatcatgttctcgactacgcgtgtcgtttacaatacgcagaatgagaagatcaatggttttatgcttcggcgtatgttcgagaaagctaaggatgggcgttatcgtacgatgggcgagattatccgatcggccaaacaggggatgctcagtactgttttccccgattcgatcaaccagttgagtttctttctgatgggtgatccgtccgtgcgtatgaatcttcctacccacaaagtgcaattgaccgcaatcaacgggcaggatcccgaagggcagtatggaactattatgctcaagtctttggaacgggtagctctgaagggtaaggtaaccgatgaaaaggggacattcgacgagacattcagtggcaaggttttcctgaccgtcttcgatggcagaaagaaaatgacagctttggaagaggagggaaacgatctctctcttgtatattatgactatcctaacgtgatgtatgccggtattgccgaggtgaaagacggactcttcgaaacttcgtttatcgtacccaaggatgtgaactattccgagcacgaaggccggatcaatctttatgcttataacgagagcacaaaggcggaagccatgggggtagacttctccatcagagtccaaccgggtattcctgatgaggtaacggaagataatacaccgcctgaaatcataagctgcttcctcaatgacagtacattccgatcgggagatgaggttaatcctactcctctgtttatggccgaagtattcgacttgaatggaatcaatatcacgggtagcggagtagggcatgatattacgctttgtatcgatggccgtgccgacctgacctacaacctcaatgcatatttcacaagttcggctacggatgcaggtgtgggcactattctcttcatgataccggctttggccgaaggagatcatactgcccgactgacggtttgggacattttcaataatgccgtccatcatgacttttcattcagagtggtagatggcattgctccggatgtggctgatgtgattctattcccgaatccggtacgcgagagtgctacgttccgaatcttccacaatcgccccggaagcgatttgaacgtggccgtggagatctatgacttcaccggtcgtcttgtgaacagtttgccagtcaagacctattcgtcttcctacggagaacctatagagatcaagtgggatctgacctccaaatacggagtgaagatcggaaacggattctacctctatcgttgtgtggtgaactctcccggaggacagacggcctccatggccaagaaaatgatcgtggtaggacaa

SEQ ID NO: 71 - DNA, 1668 bp, Porphyromonas gingivalis
atgaaaaagcttttacaggctaaagccttgattctggcattgggactcttccaactgcccgcaatcgcccaaacgcaaatgcaagcagaccgaacaaacggtcaatttgcaacagaagagatgcaacgagcattccaggaaacgaatccccctgcaggtcctgtgcgtgctatcgctgagtacgaacgctctgcagccgttttggtacgctacccgttcggtatcccgatggaattgatcaaagagctggccaagaacgacaaggtgattaccattgtggcgagtgaaagccaaaaaaacaccgttataacccagtacacccaaagcggtgtgaatctctctaattgcgatttcatcattgcgaaaactgactcttactggacacgcgactataccggttggttcgcaatgtacgatacgaacaaagtaggtctcgtggactttatttataaccgccctcgtcctaacgatgatgaattccccaaatacgaagcacaatatctgggcatcgagatgttcgggatgaagctcaagcagaccggtggcaactacatgacggacggatatggatccgctgtgcagtcacatatcgcatatacggagaactcctctctgtctcaagctcaagtaaatcaaaagatgaaagactatctcggcatcacacatcatgatgtggtacaagatccgaacggcgaatatatcaaccatgtggactgttggggcaagtatttggcaccgaacaaaatcctcatcaggaaagtgcctgacaatcaccctcagcaccaagccctggaagatatggcagcctacttcgcagcacagacctgcgcatggggaacgaagtacgaggtatatcgcgctttggccaccaatgaacaaccgtacacgaactctctgattctgaacaacagggtatttgttcctgtcaatggccccgcctccgtggacaacgatgctctgaacgtctataagacggcaatgcccggttacgaaattataggtgtcaaaggggcttcaggaacaccttggttaggaacagatgccctgcattgtcgtactcacgaggtagcggataagggctatctctatatcaagcactacccgatactgggcgaacaggcaggccctgattataagatcgaagcagatgtcgtctcatgcgccaatgctactatctcgccggtacaatgttactatcgtatcaatggttccggtagctttaaggctgctgatatgacgatggaatcaacaggtcactatacttatagctttacaggtcttaacaagaatgataaggtagaatactatatctctgccgctgacaatagtggtcgcaaagagacttatccctttatcggcgaacctgatcctttcaagtttacgtgtatgaacgaaaccaatacatgtactgtgaccggagctgccaaagctcttcgtgcatggttcaacgccggtcgttcagaactggctgtttcggtaagtttgaatattgccggcacatatcggataaagctttataacaccgcaggagaagaagtcgctgcaatgaccaaggaattagtagcagggacgagtgtcttcagtatggatgtgtattctcaggctccgggcacatatgttctggttgttgaaggaaatggaatccgtgagacaatgaaaattctcaaa

SEQ ID NO: 72 - DNA, 1284 bp, Porphyromonas gingivalis
atgaaactttcatctaagaaaatcttagcaatcattgcattgctgacgatgggacatgctgtgcaggcacagtttgttccggctcccaccacagggattcgcatgtctgtcactacaaccaaggccgtaggcgaaaaaatcgaattgttggttcattccatagagaagaaaggcatctggatcgatctcaatggggatgccacttaccaacaaggagaggaaataaccgtattcgatgaggcataccacgaatacacgatcgggacgcaaaccctcactatctatggtaatacgacccgattgggctgtcgatctaccggtgcaacggctgtcgatgtaacgaaaaaccctaatctgacctatctcgcatgcccgaaaaataatctgaaatcattggacttgacgcaaaacccaaagctgctgcgagtttggtgcgactctaacgaaatagaaagtttggacctgagtggcaatccggctttgatcatcctcggctgtgacaggaataagctgactgagctgaagaccgataacaaccccaagttggcctctctttggtgttctgataataacctgacggagttggaactcagtgccaatcctcgtctcaatgatctttggtgcttcggtaatcggatcacgaaactcgatctgagtgccaatcctctattggtaacactttggtgcagtgacaatgagctttcgaccttggatctttccaagaattcggacgttgcttacctttggtgttcatcgaacaaacttacatccttgaatctgtcgggggtgaagggactgagtgttttggtttgtcattccaatcagatcgcaggtgaagaaatgacgaaagtggtgaatgctttgcccacactatctcccggcgcaggcgctcagagcaagttcgtcgttgtagacctcaaggacactgatgagaagaatatctgtaccgtaaaggatgtggaaaaagctaaaagtaagaactggcgagtatttgacttcaacggtgattctgacaatatgcttccatacgaaggaagtccgacatcgaacttggcagtagatgctcccactgtcaggatatatcccaatccggtaggaagatatgcgctcgtcgagatccccgagtctcttttagggcaggaagctgctttatacgatatgaatggggtaaaagtctatagtttcgcggtagagtctcttcgtcagaacattgacctgacacatcttcccgacggcacttatttcttccgtctcgataactataccactaagctcatcaaacag

SEQ ID NO: 73 - DNA, 930 bp, Porphyromonas gingivalis
atgagaaaaacaataattttctgcttgttgctcgccctatttggctgttcttgggcacaagaaagagtcgatgaaaaagtattctccgcaggaacaagtatttttaggggcatccttgaaaaggtgaaagcaccgcttatgtatggagatcgtgaggtatggggtatggctcgtgcgagcgaggatttcttttttatacttcccgttacggatgacctcactcccgtgcttttctataaccgtcttacaaacgaaccctgctttgtgtcagaccaaggaataactgagtatttcaaattcgctcaagaaggtgattacattgaagtcgaaggaagctctgtattcatggcgaatcttttgtactatcgttttttcccgacaagaattacctcctataatgctcccattgaaggtgttgtgagcaagacgggaaatcctgcttttacaatcccgatgctcccgggggtttctgattgcatagaaatctcaaacaaccgcaaagtctttctgaccaatcaattaggggttgtaaacatcactgacgggatggaacctccgattattgccggagtctctgcttcctatggatcttccgtccgggtgtatggtcatgtctcacagcggtgggacatcataggccattgctatttggatatctacccaaccaattgctatccgctcagcacgaaacccgttgcaggagacgatgaggtttttgtcaaacaacaaggcaggcaaatagagatcgatagcaacagccccatagtccaagtggtcgtatacgatcttgaggggaaaagtgtttttcgcaaaagaatgaccgaaaacgcttataccctatcctttagagcacccatgctcggctttatgaccatcatgatcgaaacacaaaattcgattatcaataaaaaacttaatgttacacagcta

SEQ ID NO: 74 - DNA, 1215 bp, Porphyromonas gingivalis
atgaaaaaaacaaccattatttctttgattgtcttcggtgctttctttgcagccgtgggccaaaccaaggacaattcttcttacaaacctttttcgaaagaagatattgccggaggagtttactctctcccgactcaaaatcgtgcgcagaaggacaatgccgagtggcttcttacagcgaccgtctccacaaaccagtctgcagatactcactttatcttcgatgagaacaaccgctatatcgctcgtgacataaaagccaatggggtaagaaaatccacggactccatttactacgatgccaacgggcgaatatcgcatgtggatctttatatctcgttcagtggcggagagcctgcactcgacacccgattcaagtacacctatgatgacgagggaaagatgaccgtgagggaagtattcatgctggtaatggatccgaatacacctatctcacgcttggaatatcattatgatgcacagggcagactgacccactggatttcttttgctttcggggcagaatcccaaaagaatacgtatcactataatgaaaaaggtctgttggtcagcgaagtgctgagcaatgcaatggggacaacctattcagacaccggcaaaacggaatacagctatgacgatgcagataatatggtgaaggccgagtacttcgtcgtccagcaaggaaaggcatggcaagtactcaaaagagaggaatacacctatgaggacaatatctgcatacaatatttggctattaacggtaccgacacaaaggtgtacaagcgagacatcgagagcgataagtccatctccgcaaatgtcattgacattccgtcaatgccggaacagacctggcctaatatgtacggattcaacgcaaagcgactgaaagagacttattcctcctacgaaggagatgtggctactcctatattcgactatatctatacgtacaaggctcttacctcaatggcaacaccttcgacagaagctcaggtagcagtctatctcaatccgtcaacggaccggttagtgattctggccaacggcatcacacatctgagcatgtacgacttgcagggtaagcttatccgtgattgtgccttgagcggcgataaggtggaaatgggtgtcggatctttgaccaaagggacatacctgcttaaagtgaatacggatcagggagcctttgtgagaaaagtcgtgattcga

SEQ ID NO: 75 - protein, 454 aa, Porphyromonas gingivalis
FCVMAKVIKTKKGLALNLKGKPLPEMLAEPAQSPTYAVVPDDFEGVIPKVTARPGDKVRAGSALMHHKAYPEMKFTSPVSGEVIAVNRGAKRKVLSIEVKPDGLNEYESFPVGDPSALSAEQIKELLLSSGMWGFIKQRPYDIVATPDIAPRDIYITANFTAPLAPDFDFIVRGEERALQTAIDALAKLTTGKVYVGLKPGSSLGLHNAEIVEVHGPHPAGNVGVLINHTKPINRGETVWTLKATDLIVIGRFLLTGKADFTRMIAMTGSDAAAHGYVRIMPGCNVFASFPGRLTIKESHERVIDGNVLTGKKLCEKEPFLSARCDQITVIPEGDDVDELFGWAAPRLDQYSMSRAYFSWLQGKNKEYVLDARIKGGERAMIMSNEYDRVFPMDIYPEYLLKAIIAFDIDKMEDLGIYEVAPEDFATCEFVDTSKIELQRIVREGLDMLYKEMN

SEQ ID NO: 76 - protein, 201 aa, Porphyromonas gingivalis
ELSKCYMDKVSYALGLSIGNNFKSSGIDSVVMDDFMQGLSDVLEEKAPQLSYDEAKREIEAYFMDLQQKAVKLNKEAGEEFLKINAHKEGVTTLPSGLQYEVIKMGEGPKPTLSDTVTCHYHGTLINGIVFDSSMDRGEPASFPLRGVIAGWTEILQLMPVGSKWKVTIPSDLAYGDRGAGEHIKPGSTLIFIIELLSINK

SEQ ID NO: 77 - protein, 279 aa, Porphyromonas gingivalis
QKNKRKMKKALLIGAALLGAVSFASAQSLSTIKVQNNSVQQPREEATIQVCGELAEQVDCIGTGNSAIIAAAAKFESDDLESYVGWEIMSVDFFPGYKACKYTSAVWADDMTILGQSEDSDPEMQTINNLALKTSVKIEAGKNYIVGYIANTAGGHPIGCDQGPAVDGYGDLVSISEDGGATFPPFESLHQAVPTLNYNIYVVVHLKKGEGVEAVLTNDKANAYVQNGVIYVAGANGRQVSLFDMNGKVVYTGVSETIAAPQKGMYILRVGAKSIKLAI

SEQ ID NO: 78 - protein, 562 aa, Porphyromonas gingivalis
TRNVSLIKMPRIMKLKIALRLLLATFAIVLFSPLAKAQMDIGGDDVLIETMSTLSGYSEDFYYKMAVADNGWIYVMLDFSRIYFDDVRLYRSKDGGATYQKLGSLGSLVPYDFDVSHCDFIVTGKDEDDINVWTVMTAFEYVGGTIGNGVLLMHRHDADINNTECVYKKDFPNNRLMGVAIASNYRAPSPYGLGGDPFALAVAVSGSGSDHSFLDYIFSLDGGVHFEQKRIYTRPQKLTINRVDLSLGSTSPSLGFNTWPLMGVVFEMNKNLDGFDIGFISNFVDYDPRYAWSEPIIIEEDCGWTDFNPLGALSIEIQMMLDDNSDNTVGGERSHNFLITYPGHYVYPKQSFNYSPGHTPTKKDLVFKHCIGIPALAYDKEGDRYLTTFQDHNLMRYRWIKYDDINSFYGWSWPYVYAKEAKDKKRRRPQVALNPTNGKACWVWHTRKSPYDETKPHPTPVIIKHFLWSDTEWVHALDVGDVLQKEGSMKLYPNPAKEYVLINLPKEGGHEAVVYDMQGRIVEKVSFSGKEYKLNVQYLSKGTYMLKVVADTEYFVEKIIVE

SEQ ID NO: 79 - protein, 391 aa, Porphyromonas gingivalis
QMKRLLPFLLLAGLVAVGNVSAQSPRIPQVDVHTRIARNARYRLDKISVPDSRQIFDYFYKEETIPTKIQTTTGGAITSIDSLFYEDDRLVQVRYFDNNLELKQAEKYVYDGSKLVLREIRKSPTDETPIKKVSYHYLCGSDMPFEITTEMSDGYFESHTLNYLNGKIARIDIMTQQNPSAELIETGRMVYEFDANNDAVLLRDSVFLPLQNKWVEMFTHRYTYDNKHNCIRWEQDEFGTLTLANNFEYDTTIPLSSVLFPTHEEFFRPLLPNFMKHMRTKQTYFNNSGEGLSEVCDYNYFYTDMQGNALTDVAVNESIKIYPRPATDFLRIEGSQLLRLSLFDMNGKLIRATELTGDLAIIGVASLPRGTYIAEITAANSKTIRAKVSLR

SEQ ID NO: 80 - protein, 324 aa, Porphyromonas gingivalis
LTLFCCNYFKQMRANIWQILSVSVLFFFGTAIGQAQSRNRTYEAYVKQYADEAIRQMSRYNIPASITIAQALVETGAGASTLASVHNNHFGIKCHKSWTGKRTYRTDDAPNECFRSYSAARESYEDHSRFLLQPRYRPLFKLDREDYRGWATGLQRCGYATNRGYANLLIKMVELYELYALDREKYPSWFHKSYPGSNKKSHQTTKQKQSGLKHEAYFSYGLLYIIAKQGDTFDSLAEEFDMRASKLAKYNDAPVDFPIEKGDVIYLEKKHACSISKHTQHVVRVGDSMHSISQRYGIRMKNLYKLNDKDGEYIPQEGDILRLR

SEQ ID NO: 81 - protein, 373 aa, Porphyromonas gingivalis
GSCGSSPAIGRSGCSRCDRRIGHGLSTSAFRTYAGLVCHSRLRDQSSCRVCGMRPIGQLFFPSCPRRSASDAGRTERIQSPLQNLLQEMQFSPTNRRNPFDNMNSRHLTITIIAGLSLFVLTLGGCSVAQQDTQWTLGGKLFTSAWIQRSAEYQALCIQAYNIATERVDALPAERKQGDRPYAIVTDIDETILDNTPNSVYQALRGKDYDEETWGKWCAQADADTLAGALSFFLHAANKGIEVFYVTNRRDNLREATLQNLQRYGFPFADEEHLLTTHGPSDKEPRRLKIQEQYEIVLLIGDNLGDFHHFFNTKEESGRKQALGLTAGEFGRHFIMLPNPNYGSWEPAWYGGKYPPLPERDKALKQLHSQNSR

SEQ ID NO: 82 - protein, 763 aa, Porphyromonas gingivalis
HFLVTIMRTKTIFFAIISFIALLSSSLSAQSKAVLTGSVSDAETGEPLAGARIEVKHTNIVAGADAGGHFEIKNLPAGQHTIICSLGGYGQKEEVVAIEAGQTKTISFALRLRTNNLEEVVVTGTGTRYRLVDAPVATEVLTAKDIASFSAPTSEALLQGLSPSFDFGPNLMGSFMQLNGLSSKYILILIDGKRVYGDVGGQADLSRISPDQIERIELVKGASSSLYGSDAIAGVINVITKKNTNRLSAYTSHRISKYNDRQTNTSLDINIGKFSSNTNYFFYHTDGWQNSPFEIKKKKGSGEPVLEETYKKTFRAQENQGVSQSLSYYATNNLSFSGNVQYNKRQIFTPTFSEKKAYDMDYRALTASLGTNYLFPNGLHTLSFDAVYDRFRFGYLYHDKDSSESLINNQGQTEQPTFFPGQLRNKNDQIRYTAEARGVFTLPYAQKLTGGLEYFREELISPYNLITDKADASTLSAYVQDEWKPLDWFNMTAGFRLVHHQEFGTRMTPKVSILAKYGPLNFRATYANGYKTPTLKELFARNELTTMGSHNLYLGNADLKPQMSDYYALGLEYNQGPISFSATVYDNELRNLISFMDIPTSPEHEAQGIKKTKQYANIGKARSRGLDVLCDASIGWGIKLGAGYSLVEAKNLQTDEWLEGAARHRANVHADWVHYWGQYRLGVSLFGRIQSERYYKDGNAPDYTLWRLATSHRFAHFRHIILDGTLGIDNLFDYVDDRPMGVNYATVTPGRTFFAQIAIRFNN

SEQ ID NO: 83 - protein, 365 aa, Porphyromonas gingivalis
CCARLRDTSPRKKSFRNDTVFPYFVIHLIKHIIIMTDNKQRNIVFPAFLLLLGVIAVVTIVGFFMLRPAEEIIQGQIEVTEYRVSSKVPGRIKELRVSEGQQVQAGDTLAVIEAPDVAAKMEQAKAAEAAAQAQNAKALKGARSEQIQAAYEMWQKAQAGVAIATKTHQRVQNLYDQGVVPAQKLDEATAQRDAAIATQKAAEAQYNMARNGAEREDKLAASALVDRARGAVAEVESYINETYLIAPRAGEVSEIFPKAGELVGTGAPIMNIAEMGDMWASFAVREDFLSSMTMGAVLETVVPALNEEKVRFKITFIKNMGTYAAWKATKTTGQYDLKTFEVKATLADKDKAQKLRPGMSVIIRK

SEQ ID NO: 84 - protein, 1046 aa, Porphyromonas gingivalis
DFPWVRVKPEKKRKQHNSNNFKFNAKEKSMKRMTLFFLCLLTSIGWAMAQNRTVKGTVISSEDNEPLIGANVVVVGNTTIGAATDLDGNFTLSVPANAKMLRVSYSGMTTKEVAIANVMKIVLDPDSKVLEQVVVLGYGTGQKLSTVSGSVAKVSSEKLAEKPVANIMDALQGQVAGMQVMTTSGDPTAVASVEIHGTGSLGASSAPLYIVDGMQTSLDVVATMNPNDFESMSVLKDASATSIYGARAANGVVFIQTKKGKMSERGRITFNASYGISQILNTKPLDNMMTGDELLDFQVKAGFWGNNQTVQKVKDMILAGAEDLYGNYDSLKDEYGKTLFPVDFNHDADWLKALFKTAPTSQGDISFSGGSQGTSYYASIGYFDQEGMAREPANFKRYSGRLNFESRINEWLKVGANLSGAIANRRSADYFGKYYMGSGTFGVLTMPRYYNPFDVNGDLADVYYMYGATRPSMTEPYFAKMRPFSSESHQANVNGFAQITPIKGLTLKAQAGVDITNTRTSSKRMPNNPYDSTPLGERRERAYRDVSKSFTNTAEYKFSIDEKHDLTALMGHEYIEYEGDVIGASSKGFESDKLMLLSQGKTGNSLSLPEHRVAEYAYLSFFSRFNYGFDKWMYIDFSVRNDQSSRFGSNNRSAWFYSVGGMFDIYNKFIQESNWLSDLRLKMSYGTTGNSEIGNYNHQALVTVNNYTEDAMGLSISTAGNPDLSWEKQSQFNFGLAAGAFNNRLSAEVDFYVRTTNDMLIDVPMPYISGFFSQYQNVGSMKNTGVDLSLKGTIYQNKDWNVYASANFNYNRQEITKLFFGLNKYMLPNTGTIWEIGYPNSFYMAEYAGIDKKTGKQLWYVPGQVDADGNKVTTSQYSADLETRIDKSVTPPITGGFSLGASWKGLSLDADFAYIVGKWMINNDRYFTENAGGLMQLNKDKMLLNAWTEDNKETDVPKLGQSPQFDTHLLENASFLRLKNLKLTYVLPNSLFAGQNVIGGARVYLMARNLLTVTKYKGFDPEAGGNVGKNQYPNSKQYVAGIQLSF

SEQ ID NO: 85 - protein, 869 aa, Porphyromonas gingivalis
WHRNIFIFASTFSPKNMLPLPYRYAKTEHLFLAKGYCKNPITNIIILFMKKKNFLLLGIFVALLTFIGSMQAQQAKDYFNFDERGEAYFSFKVPDRAVLQELALIMSIDEFDPVTNEAIAYASEEEFEAFLRYGLKPTFLTPPSMQRAVEMFDYRSGEKYEWNAYPTYEAYISMMEEFQTKYPSLCTTSVIGKSVKDRKLMICKLTSSANTGKKPRVLYTSTMHGDETTGYVVLLRLIDHLLSNYESDPRIKNILDKTEVWICPLTNPDGAYRAGNHTVQGATRYNANNVDLNRNFKDDVAGDHPDGKPWQPEATAFMDLEGNTSFVLGANIHGGTEVVNYPWDNKKERHADDEWYKLISRNYAAACQSISASYMTSETNSGIINGSDWYVIRGSRQDNANYFHRLREITLEISNTKLVPASQLPKYWNLNKESLLALIEESLYGIHGTVTSAANGQPLKCQILIENHDKRNSDVYSDATTGYYVRPIKAGTYTVKYKAEGYPEATRTITIKDKETVIMDIALGNSVPLPVPDFTASPMTISVGESVQFQDQTTNNPTNWEWTFEGGQPAMSTEQNPLVSYSHPGQYDVTLKVWNASGSNTITKEKFITVNAVMPVAEFVGTPTEIEEGQTVSFQNQSTNATNYVWIFDGGTPATSEDENPTVLYSKAGQYDVTLKAISASGETVKTKEKYITVKKAPVPAPVADFEGTPRKVKKGETVTFKDLSTNNPTSWLWVFEGGSPATSTEQNPVVTYNETGKYDVQLTATNEGGSNVKKAEDYIEVILDDSVEDIVAQTGIVIRPQNGTKQILIEANAAIKAIVLYDINGRVVLKTTPNQLRSTVDLSILPEGIYTINIKTEKSARTEKIHIG

SEQ ID NO: 86 - protein, 106 aa, Porphyromonas gingivalis
LSYSGESDAKESDQNCRKCTFIGFEKRVNTMRLIKAFLVQLLLLPIFFYKRFISPLTPPSCRFTPSCSSYAIEALRKYGPGKGLLLSIKRILRCHPWGGSGYDPVP

SEQ ID NO: 87 - protein, 456 aa, Porphyromonas gingivalis
RGGQIRRHHTDSSRGSDSKACRFSFHAETIGFSNHQRAKMNYLYILITLLLSGFFSGAEIAFLSSDKLRLELDRNRGDLTGRALNLLYRHPDQLVTTLLVGNNIVLVVYGLLMAGLLAAPLAQWIDNDAMIVVLQSVLSTIIILFTGEFLPKAIFKTNANMMMRVFALPIVAIYYLLYPLSKLFTGLSRSFIRLVDKNYVPTTVGLGRVDLDHYLAENMSGENEQNDLTTEVKIIQNALDFSGIQVRDCMIPRNEMIACELQTDIEVLKTTFIDTGLSKIIIYRQNIDDVVGYIHSSEMFRGQDWQKRINTTVFVPESMYANKLMRLLMQRKKSIAIVIDELGGTAGMVTLEDLVEEIFGDIEDEHDTRKIIAKQLGPHTYLVSGRMEIDDVNERFGLSLPESDDYLTVAGFILNSHQNIPQANEVVEIAPYTFTILRSSSTKIELVKMSIDDQSN

SEQ ID NO: 88 - protein, 299 aa, Porphyromonas gingivalis
LKKEITMKQNYFKRVCSLLWLVLPMLIMPLEVAAQEIIPNEEVLESLTFVAPVEETDAIEAEVEALQEIVATEEIAEQAVRSYTYTVYRDGVKIASGLTEPTFLDEDVPAGEHTYCVEVQYQGGVSDKVCVDVEVKDFKPVTNLTGTASNDEVSLDWDGVEEKAEEPASDKAVSYNVYKNGTLIGNTAETHYVETGVANGTYIYEVEVKYPDGVSPKVAVTVTVTNSSLSNVDGQAPYTLRVEGKKIIAEAHGMITLYDINGRTVAVAPNRLEYMAQTGFYAVRFDVGNKHHVSKIQVR

SEQ ID NO: 89 - protein, 377 aa, Porphyromonas gingivalis
LFNHKKSWYETFQFYLVVFRSGFILLCENTLAQQKTEEFAPVSDLRAEAYGSTVFLHWTPPYDNPMIPLSESFESGIPAIWKTIDADGDGYNWMHLTNFTGQSGLCVSSASYIGGVGALTPDNYLITPELKLPTDALVEIIYWVCTQDLTAPSEHYAVYSSSTGNNAADFVNLLYEETLTAKRIQSPELIRGNRTQGVWYQRKVVLPNDTKYVAFRHFNSTDNFWLNLDEVSILYTPLPRRAPCPHPGGYTYSVFRDGQKIASGLSALAYIDTDVPYGTQDYCVQVNYLQGDSYKVCKNIVVANSANIYGADKPFALTVVGKTIVASAFKGEITLYDIRGRLIASGCDTLRYKAENGFYLIKIQVNGTVYTEKIQIQ

SEQ ID NO: 90 - protein, 849 aa, Porphyromonas gingivalis
FGISPSMKKSFLLAIVMLFGIAMQGHSAPVTKERALSLARLALRQVSLRMGQTAVSDKISIDYVYRQGDAERGITSQEEGSPAYFYVANRGNNEGYALVAADDRIPTILAYSPIGRFDMDSMPDNLRMWLQIYDQEIGLILSGKAQLNEEILRTEGVPAEVHALMDNGHFANDPMRWNQGYPWNNKEPLLPNGNHAYTGCVATAAAQIMRYHSWPLQGEGSFDYHAGSLVGNWSGTFGEMYDWINMPGNPDLDNLTQSQVDAYATLMRDVSASVSMSFYENGSGTYSVYVVGALRNNFRYKRSLQLHVRALYTSQEWHDMIRGELASGRPVYYAGNNQSIGHAFVCDGYASDGTFHFNWGWGGVSNGFYKLTLLSPTSLGIGGEGIGFTIYQEIITGIEPAKTPAEAGTDALPILALKDIEAEYKSESGLNVGYSIYNTGEEQSNLDLGYRLNKADGEVIEVKTSSINISWYGYGEHPESFSLAPNQLSQGINTITLLYRRTGTEQWEPVRHAQGGYVNSIKVNTTDPNNVVVTVDNNEGKLSIVPNSFVADLNSYEHSTITVQFNSDSPDEIRTPVAFALSTGATADDVISLGWVMAEVPGGSSNYPVVWSKDVLTLSEGDYTLWYRFSINNQKDEWKKIGSVSVKTPTEYTHPLFEVGHNQTSTYTLDMAHNRVLPDFTLKNLGLPFNGELVVVFRQTQSSSGSLWAAQETVHIKQGETFVYKPVVEGPIPDGSYRATLHAFVNGQQQLYLKGKRNYTVKIVNGTAVEAIESSEEIRVFPNPARDYVEISAPCIPQETSIILFDLSGKIVMKNSLSAGHGRMDVSRLPNGAYILKVDGYTTKINIVH

SEQ ID NO: 91 - protein, 295 aa, Porphyromonas gingivalis
TKKTLMKKLFLSLTSLVMVFAVASCDIIDKDQTLLPAPTNVTPDNPDDNPSEIDITQTHTEKYVLAEEFTGQKCLNCPKGHRKLAALKEQYGKRLTVVGIHAGPGSLVPPLFRTEAGDAYYSKFANNTPLPALMVSRKKFGSSYVYDKSYKTWDVPIAEQMEQKAKINIFAVAEYTDTQKIKVTVKGKILEGNTLPKSMVQVYLLEDKLIAPQVDGNTTVENYEHNHVLRGAVNGIWGEEFVNLKDYLYTYAVEPLSGMSFVAENYSIVAFVYDVQTFEVYDVVHVKINPQSDGK

SEQ ID NO: 92 - protein, 230 aa, Porphyromonas gingivalis
TNKKEETMKKSSVVASVLAVALVFAGCGLNNMAKGGLIGAGVGGAIGAGVGNVAGNTAVGAIVGTAVGGAAGALIGKKMDKQKKELEAAVPDATIQTVNDGEAILVTFDSGILFATNSSTLSPNSRTALTKFAANMNKNPDTDIRIVGHTDNTGSDKINDPLSERRAASVYSFLNSQGVSMSRMAAEGRGSHEPVADNSTVAGRSANRRVEVYILPNAKMIEQAQQGTLK

SEQ ID NO: 93 - protein, 679 aa, Porphyromonas gingivalis
PIPFLLNMYSGHHKIHYPFLILLVCLAFAACKSVKLKDAEKAHDRQEYTKAADMYNTLYRRTRRKQVEMKAYTAFRSGENYRAAGRQAKALRGYLNARRYGYPDSVVLLRLAQTYQQGGNYKEAEVLFRGYLEAYPKSYFAAIGLEGCLFARQQKEYPTRYRIRRAAEWNSARGDFGPAYAPDASALYFTSSRSKDDGLDNSSITGLKPNDIYIIKRDAQGRWGRPDSVSGGINTPWDEGVPTITPDGSTIYYTLAQQGADYDRTVQIYSAARSGEGGWSNGSLVDIMRDSLRMAAHPSMSASGDYLYFVSNIGGSYGGKDIYRVKVSDRSYGSPENLGPDINTPGDEMFPFIDGDSTLFFASDGHAGLGGLDIFKATLDSTGQWHVVNMGQPVNSSADDFGLAVEPKGKNKEEALPDNGVKGVFCSNRGDARGWPHLFHFELPAIYTEIQGYVMDREENPIAGATVRIVGERGPVGQGFVTTRDDGSYKMSVQGDTRYVMLAGASGYLNQYVELKTDTAKQSETYYVDFFLASREKAEGLQNIFYDFDKATLRPESMKSLDELIRILTDNPDIRIELGSHADRKGPDAYNLGLSDRRAKSVVDYLTSRGIAADRLTWKGYGKSVPKTVTAKIAERHDFLKEGDVLTEEFVAPLTEEQQSVCDQLNRRTEFRVIEEELR

SEQ ID NO: 94 - protein, 329 aa, Porphyromonas gingivalis
NLRTQPFFLVDLQSMIRTILSRYVSSNFWSRGATFFFTIFPAFILAATALPACGGGTASGSDRTLAVTIEPQKYFIESIADKSVQVVALVPAGSNPEEYDPSPTVMKRLSEADAYFYIGGLGFEQRNLAAIRDNNPKLPLFEMGKALADAGSADLHGSCTDHSHTDLHAHDPHYWSSVVGAKALSRAAYDALVELYPNEKDKWDKGHDRLNGRIDSVKRLVDTMFANGKADKAFVIYHPSLSFFAQEFGLRQIVIEEDGKEPTAAHLRRVIDQARADGVRIVFIQPEFETRQAEDIAREIGARPVRINPLRSSWEEEILHIARALAHER

SEQ ID NO: 95 - protein, 962 aa, Porphyromonas gingivalis
AIFVVSLQIEKITENKYNSDKSMNKFYKSLLQSGLAAFVSMATALTASAQISFGGEPLSFSSRSAGTHSFDDAMTIRLTPDFNPEDLIAQSRWQSQRDGRPVRIGQVIPVDVDFASKASHISSIGDVDVYRLQFKLEGAKAITLYYDAFNIPEGGRLYIYTPDHEIVLGAYTNATHRRNGAFATEPVPGSELIMDYEVSRGGTLPDIKISGAGYIFDKVGGRPVTDNHYGIGEDDSDSDCEININCPEGADWQAEKNGVVQMIMVKGQYISMCSGNLLNNTKGDFTPLIISAGHCASITTNFGVTQSELDKWIFTFHYEKRGCSNGTLAIFRGNSIIGASMKAFLPIKGKSDGLLLQLNDEVPLRYRVYYNGWDSTPDIPSSGAGIHHPAGDAMKISILKKTPALNTWISSSGSGGTDDHFYFKYDQGGTEGGSSGSSLFNQNKHVVGTLTGGAGNCGGTEFYGRLNSHWNEYASDGNTSRMDIYLDPQNNGQTTILNGTYRDGYKPLPSVPRLLLQSTGDQVELNWTAVPADQYPSSYQVEYHIFRNGKEIATTKELSYSDAIDESIIGSGIIRYEVSARFIYPSPLDGVESYKDTDKTSADLAIGDIQTKLKPDVTPLPGGGVSLSWKVPFLSQLVSRFGESPNPVFKTFEVPYVSAAAAQTPNPPVGVVIADKFMAGTYPEKAAIAAVYVMPSAPDSTFHLFLKSNTNRRLQKVTTPSDWQAGTWLRINLDKPFPVNNDHMLFAGIRMPNKYKLNRAIRYVRNPDNLFSITGKKISYNNGVSFEGYGIPSLLGYMAIKYLVVNTDAPKIDMSLVQEPYAKGTNVAPFPELVGIYVYKNGTFIGTQDPSVTTYSVSDGTESDEYEIKLVYKGSGISNGVAQIENNNAVVAYPSVVTDRFSIKNAHMVHAAALYSLDGKQVRSWNNLRNGVTFSVQGLTAGTYMLVMQTANGPVSQKIVKQ

SEQ ID NO: 96 - protein, 938 aa, Porphyromonas gingivalis
SENYRYGKITNQIMAIMMKSIVFRAFLTILLSWAAITNPTAQEISGMNASCLAAPAQPDTILYESFENGPVPNGWLEIDADADGATWGSPSGSFSVPYGHNGLCTYSHIRSGISTAGNYLITPNIEGAKRVKYWVCNQYSTNPEHYAVMVSTTGTAIEDFVLLFDDSITGKPTPLVWRRRIVDLPEGTKYIAWRHYKVTDSHTEFLKLDDVTVYRSIEGPEPATDFTVINIGQNVGRLTWNYPEDYQPEGKGNEELQLSGYNIYANGTLLAQIKDVSILEYVDSTYSLRDNPLQVEYCVTAVYDESIESSTVCGTLHYATDAILYENFENGPVPNGWLVIDADGDGFSWGHYLNAYDAFPGHNGGHCSLSASYVPGIGPVTPDNYLITPKVEGAKRVKYWVSTQDANWAAEHYAVMASTTGTAVGDFVILFEETMTAKPTGAWYERTINLPEGTKYIAWRHYNCTDIYFLKLDDITVFGTPASEPEPVTDFVVSLIENNKGRLKWNYPNGYEPDKTDDKDPLQLAGYNIYANGSLLVHIQDPTVLEYIDETYSSRDDQVEVEYCVTAVYNDNIESQSVCDKLIYDSQSDIILYEGFEAGSIPEGWLLIDADGDNVNWDYYPWTMYGHDSEKCIASPSYLPMIGVLTPDNYLVTPRLEGAKLVKYWVSAQDAVYSAEHYAVMVSTTGTAVEDFVLLFEETMTAKANGAWYERTITLPAGTKYIAWRHYDCTDMFFLLLDDITVYRSTETVPEPVTDFVVSLIENNKGRLKWNYPNGYEPDKTDDKKPLQLTGYNIYANGSLLVHIQDPTVLEYIDETYSSRDGQVEMEYCVTAVYNDNIESQSVCDKLNYTITSLDNIQSDTSLKIYPNPASYVVRIEGLSRSKSTIELYNALGICILREETHSEKTEIDVSRLNDGVYLIKVVGGNKTTTEKVEIKRP

SEQ ID NO: 97 - protein, 337 aa, Porphyromonas gingivalis
PQPVGLKEITIKPMCLEPIIAPISSELLEQELTADRFLRMTNKAGNEIYVFTAEEAPHCMKEVGRLREEAFRHYGGGTGKAIDIDEFDTMPGSYKQLIVWDPQNKAILGGYRFIYGRDVAFDTDGKPLLATAEMFRFSDAFLHDYLPYTVELGRSFVSLQYQSTRMGTKAIFVLDNLWDGIGALTVVNPEALYFYGKVTMYKDYDRRARNLILYFLRKHFSDPEGLVKPIHPLPIEISAEDEALFSSSDFDTNYKTLNIEVRKLGINIPPLVSAYIALSPEMRVFGTAVNESFGEVEETGIFIAVGKILEEKKQRHIESFILSRNEKKGLDSSNGRS

SEQ ID NO: 98 - protein, 1251 aa, Porphyromonas gingivalis
  misc_feature (1008)..(1008): Xaa can be any naturally occurring amino acid
KWKLACAFDCACCFDPFVVTNEVIIMMKRYTIILAVFLLFCTVFTFQIKARPYERFADVEKPWIQKHSMDSKLVPANKGNLIQAEIVYQSVSEHSDLVISPVNEIRPANRFPSHRKSFFAENLRASPPVVPVAVDKYAVPVANPMDPENPNAWDVTLKITTKAVTVPVDVVMVIDQSSSMGGQNIARLKSAIASGQRFVKKMLPKGTATEGVRIALVSYDHEPHRLSDFTKDTAFLCQKIRALTPIWGTHTQGGLKMARNIMATSTAVDKHIILMSDGLATEQYPVKNVTTADFIGKTGNANDPIDLVIQGAINFPTNYVSNNPSTPLTPNYPTHSSKVGRRNLPESKFDYSNLSARITFDGVAGALVYEPRFPHPYYYYFPCNAAINEAQFAKNSGYTIHTIGYDLGDFALANNSLKLTATDENHFFTATPANLAAAFDNIAQTINIGIQRGEVTDFVAPGFIVKNLTQSGDVTHLLNVSNGTVHYDVSTKKLTWTTGTILSSSEATITYRIYADLDYIQNNDIPVNTTSAIGPDLGGFDTNTEAKLTYTNSNGEPNQQLIFPRPTVKLGYGVIKRHYVLVNKDGQPIQANGTVVSSLSEAHVLQSQDFFLPSGGGHIVPKWIKLDKTTEALQYYSVPPTNTVITTADGKRYRFVEVPGSTPNPGQIGISWKKPAGNAYFAYKLLNYWMGGTTDQQSEWDVTSNWTGAQVPLTGEDVEFATTENFGSPAVADLHVPTTNPKIIGNLINNSDKDLVVTTSSQLTINGVVEDNNPNVGTIVVKSSKDNPTGTLLFANPGYNQNVGGTVEFYNQGYDCADCGMYRRSWQYFGIPVNESGFPINDVGGNETVNQWVEPFNGDKWRPAPYAPDTELQKFKGYQITNDVQAQPTGVYSFKGMICVCDAFLNLTRTSGVNYSGANLIGNSYTGAIDIKQGIVFPPEVEQTVYLFNTGTRDQWRKLNGSTVSGYRAGQYLSVPKNTAGQDNLPDRIPSMHSFLVKMQNGASCTLXILYDKLLKNTTVNNGNGTQITWRSGNSGSANMPSLVMDVLGNESADRLWIFTDGGLSFGFDNGWDGRKLTEKGLSQLYAMSDIGNDKFQVAGVPELNNLLIGFDADKDGQYTLEFALSDHFAKGAVYLHDLQSGAKHRITNSTSYSFDAKRGDSGARFRLSYGCDENVDDSHVVSTNGREIIILNQDALDCTVTLFTIEGKLLRRLKVLAGHREVMKVQTGGAYIVHLQNAFTNDVHKVLVEY

SEQ ID NO: 99 - protein, 406 aa, Porphyromonas gingivalis
IFIDPDKNTKQNERNMIIKKMLKNKLAPLAILFLFAPKAMKAQEQLNVVHTSVPSLNISPDARAAGMGDIGVATTPDAYSQYWNPSKYAFMDTKAGISFSYTPWLSKLVNDIALMQMTGFYKLGTDENQAISASLRYFTLGKLETFDELGESMGEAHPNEFAVDLGYSRQLSENFSMAVALRYIRSDQSTHNTGENQAGNAFAADIAGYLQKYVLLGNAESLWSLGFNVKNIGTKISYDGGVTSFFIPTSLNLGTGLLYPIDDYNSINFNLELSKLLVPTPPIMDQNDQAGYEAALKKYQETSSISGIFSSFGDAPGGLKEEFREITWGLGAEYSYDDKFFVRAGYSYLHPTKGNLQYFTAGAGFKMNIFRIDASYLLSTIQSNPLDQTLRFTLAFDMDGLRNLFH

SEQ ID NO: 100 - protein, 452 aa, Porphyromonas gingivalis
LIIEKEMKTTVQQIILCLALMMSGVLGGNAQSFWEEIAPPFISNEPNVKYIIPNMGIDSKGTIYVTVTKRIQQGANYTSEQLGMYYRPLGDNEQWWKHDPYFDDKIVADIQTDAYGRVYVCTTSSRDQEYQLYINEQNEWRCIFKTSVSTYEHGMAVFRSSTGVTYIGTRHHIFASGVNDFEFNTIYEDSTPMSCRFAEATNSGTIYLALMHETTMSTTILTYQNGEFVDISESELSNSIIASMCSNKEGDIIALVTSYTGFMSGTLAIRKADEGKWQLVGGDIQNAIVQNICMMDDNKIACEVFGTPNGVDGRTRVCVSDASVFDFEWYEDEIYGGLIFDTFFYSPWDKLLYAKFGGIMLRSKESFITSFISPTVVQGVDVYTLAGKIRIESETPVSEVLLFDLAGRMVLRQTIDNKIYSDIDTNGLKRSGIYVVSVRLSSGQVFSHKVQV

SEQ ID NO: 101 - protein, 614 aa, Porphyromonas gingivalis
PYNVQSISNKTIKKQMENLKNIQPREDFNWEEFEAGGVHAAVSRQEQEAAYDKTLNTIKEKEVVMGRVTAINKREVVINVGYKSEGVVPATEFRYNPELKVGDEVEVYIENQEDKKGQLVLSHRKGRAARSWERVNEALEKDEIVKGYVKCRTKGGMIVDVFGIEAFLPGSQIDVRPIRDYDAFVEKTMEFKIVKINQEYKNVVVSHKVLIEAELEQQKKEIIGKLEKGQVLEGIVKNITSYGVFIDLGGVDGLIHITDLSWGRVAHPEEIVQLDQKINVVILDFDEDRKRIALGLKQLMPHPWDALDSELKVGDKVKGKVVVMADYGAFVEIAQGVEGLIHVSEMSWTQHLRSAQDFLHVGDEVEAVILTLDREERKMSLGLKQLKPDPWADIETRFPVGSRHHARVRNFTNFGVFVEIEEGVDGLIHISDLSWTKKIKHPSEFTEVGADIEVQVIEIDKENRRLSLGHKQLEENPWDVFETVFTVGSIHEGTVIEVMDKGAVVSLPYGVEGFATPKHMVKEDGSQAVLEEKLPFKVIEFNKDAKRIIVSHSRVFEDEQKMAQREANAERKAEAKAAQKEAAAEAANPAQAVEKATLGDLGELAALKEKLSEN

SEQ ID NO: 102 - protein, 563 aa, Porphyromonas gingivalis
SLINNSRDWRAPVRLSLKKKTKTMKTKVLRKFVVAAFAVATLCPLAQAQTMGGDDVKVVQYNQEKLVQTRMSVADNGWIYVMTHSGYDTGNSNVKIFRSKDQGATYQKLRDWDPSDDYQFQDFDIVVTGKNESDIKIWSVELMNKPGGYKSRVAVFSRDANAQNAKLVYKEDFSNVQLYDVDIASNYRSPSSLNNGGNPFALAFAYTGFNNTHKISFVDYVFSLNGGQNFNKNLLFSQDGEKKIDKVDLSLGSTSESMGHNAWPLMGVVFEMNKQGGKSDIGFLSNFVDNDPEFQWSGPIKVSESDMSFSPKIQMLLDEDNNTINGESCHNFMITYSDYDSEYSDWDIRYVYPKKSFKYEKGKTPTMDDLVEAFLTASYQSETNSGLGYDKNANHYLITYAKKEENGTNTLKYRWANYDKIHNKDLWSDTFTYTSSANALYTPQVDINPTKGLVCWSWVEYLPGKRIVWSDTQWTHANGVEDIVMQEGSMKLYPNPAQEYAVISLPTAANCKAVVYDMQGRVVAEASFSGNEYRLNVQHLAKGTYILKVVSDTERFVEKLIVE

SEQ ID NO: 103 - protein, 1162 aa, Porphyromonas gingivalis
AISQMKRILPIVAFLSLFLALALPAKAQRAMGKTADRSLMASGHWVKIRVDASGVYRLTDEQLRANGFSDPSKVGVFGYGGGVLPEDLSRITTDDLPPVPVLRQGNALYFYAVGPVTWFYNPAKTTMEHTVNTYSTHGYYFLSDAAGAPLQMSQYTGGGASAEALIDYYDELMLHEQELYSPKESGRDLYGESFSAVNTRTVKFPLRGNTRSSGELGTVFSYIAKARSAGGGREMSLSANGILIFSDPFSMTSNEVSNSYLAGKKRRLYHSTPMNSLVNELRLDANYSMTGDAVNLDFIEVATQNDLRYDGAPMHIRRFSNLPVLGGESCRFVISEVPESLVVLQANSSLTASLVPVKTVGDKTIEFVAPPKGQDRRTINTFYAVDLSQASAPEILGAVPNQNLHGEEIPDLIIVSTQALLLEADRLATYRREKNGLKVLVVLQEQVFNEFSGGTPDATAYRLFAKMFYDRWKANAPVGETFPMQMLLFGDGAHDNRKVSVAWQKPYLQQTEFLLTFQAVNSTNVNSYVTDDYFGLLDDQPASVNIGWRNYNMAVGRFPVRTPAEARIAVDKTIRYEEDRESGAWRIRACFAADNGDKHATETSRLIDTVKRYAPAIMPVRAFQDVYPHVIENGLHSIPGAKKKMLETLQSGIILLNYAGHGGPAGWSDEHLLTLNDIHKFNYKHMPIWITATCDFANYDSQTTSAGEEVFLHEKSGTPIMFSTTRVVYNTQNEKINGFMLRRMFEKAKDGRYRTMGEIIRSAKQGMLSTVFPDSINQLSFFLMGDPSVRMNLPTHKVQLTAINGQDPEGQYGTIMLKSLERVALKGKVTDEKGTFDETFSGKVFLTVFDGRKKMTALEEEGNDLSLVYYDYPNVMYAGIAEVKDGLFETSFIVPKDVNYSEHEGRINLYAYNESTKAEAMGVDFSIRVQPGIPDEVTEDNTPPEIISCFLNDSTFRSGDEVNPTPLFMAEVFDLNGINITGSGVGHDITLCIDGRADLTYNLNAYFTSSATDAGVGTILFMIPALAEGDHTARLTVWDIFNNAVHHDFSFRVVDGIAPDVADVILFPNPVRESATFRIFHNRPGSDLNVAVEIYDFTGRLVNSLPVKTYSSSYGEPIEIKWDLTSKYGVKIGNGFYLYRCVVNSPGGQTASMAKKMIVVGQ

SEQ ID NO: 104 - protein, 563 aa, Porphyromonas gingivalis
HHKTYQTMKKLLQAKALILALGLFQLPAIAQTQMQADRTNGQFATEEMQRAFQETNPPAGPVRAIAEYERSAAVLVRYPFGIPMELIKELAKNDKVITIVASESQKNTVITQYTQSGVNLSNCDFIIAKTDSYWTRDYTGWFAMYDTNKVGLVDFIYNRPRPNDDEFPKYEAQYLGIEMFGMKLKQTGGNYMTDGYGSAVQSHIAYTENSSLSQAQVNQKMKDYLGITHHDVVQDPNGEYINHVDCWGKYLAPNKILIRKVPDNHPQHQALEDMAAYFAAQTCAWGTKYEVYRALATNEQPYTNSLILNNRVFVPVNGPASVDNDALNVYKTAMPGYEIIGVKGASGTPWLGTDALHCRTHEVADKGYLYIKHYPILGEQAGPDYKIEADVVSCANATISPVQCYYRINGSGSFKAADMTMESTGHYTYSFTGLNKNDKVEYYISAADNSGRKETYPFIGEPDPFKFTCMNETNTCTVTGAAKALRAWFNAGRSELAVSVSLNIAGTYRIKLYNTAGEEVAAMTKELVAGTSVFSMDVYSQAPGTYVLVVEGNGIRETMKILK

SEQ ID NO: 105 - protein, 437 aa, Porphyromonas gingivalis
TTNRKPNTNMKLSSKKILAIIALLTMGHAVQAQFVPAPTTGIRMSVTTTKAVGEKIELLVHSIEKKGIWIDLNGDATYQQGEEITVFDEAYHEYTIGTQTLTIYGNTTRLGCRSTGATAVDVTKNPNLTYLACPKNNLKSLDLTQNPKLLRVWCDSNEIESLDLSGNPALIILGCDRNKLTELKTDNNPKLASLWCSDNNLTELELSANPRLNDLWCFGNRITKLDLSANPLLVTLWCSDNELSTLDLSKNSDVAYLWCSSNKLTSLNLSGVKGLSVLVCHSNQIAGEEMTKVVNALPTLSPGAGAQSKFVVVDLKDTDEKNICTVKDVEKAKSKNWRVFDFNGDSDNMLPYEGSPTSNLAVDAPTVRIYPNPVGRYALVEIPESLLGQEAALYDMNGVKVYSFAVESLRQNIDLTHLPDGTYFFRLDNYTTKLIKQ

SEQ ID NO: 106 - protein, 318 aa, Porphyromonas gingivalis
NHLKTNIKMRKTIIFCLLLALFGCSWAQERVDEKVFSAGTSIFRGILEKVKAPLMYGDREVWGMARASEDFFFILPVTDDLTPVLFYNRLTNEPCFVSDQGITEYFKFAQEGDYIEVEGSSVFMANLLYYRFFPTRITSYNAPIEGVVSKTGNPAFTIPMLPGVSDCIEISNNRKVFLTNQLGVVNITDGMEPPIIAGVSASYGSSVRVYGHVSQRWDIIGHCYLDIYPTNCYPLSTKPVAGDDEVFVKQQGRQIEIDSNSPIVQVVVYDLEGKSVFRKRMTENAYTLSFRAPMLGFMTIMIETQNSIINKKLNVTQL

SEQ ID NO: 107 - protein, 461 aa, Porphyromonas gingivalis
RRAVKIRSPPHIHSLFVRKCLFSDFKYLYLSRKITQERLGRLSIRLKSYNPIIIIEMKKTTIISLIVFGAFFAAVGQTKDNSSYKPFSKEDIAGGVYSLPTQNRAQKDNAEWLLTATVSTNQSADTHFIFDENNRYIARDIKANGVRKSTDSIYYDANGRISHVDLYISFSGGEPALDTRFKYTYDDEGKMTVREVFMLVMDPNTPISRLEYHYDAQGRLTHWISFAFGAESQKNTYHYNEKGLLVSEVLSNAMGTTYSDTGKTEYSYDDADNMVKAEYFVVQQGKAWQVLKREEYTYEDNICIQYLAINGTDTKVYKRDIESDKSISANVIDIPSMPEQTWPNMYGFNAKRLKETYSSYEGDVATPIFDYIYTYKALTSMATPSTEAQVAVYLNPSTDRLVILANGITHLSMYDLQGKLIRDCALSGDKVEMGVGSLTKGTYLLKVNTDQGAFVRKVVIR

SEQ ID NO: 108 - protein, 451 aa, Porphyromonas gingivalis
MAKVIKTKKGLALNLKGKPLPEMLAEPAQSPTYAVVPDDFEGVIPKVTARPGDKVRAGSALMHHKAYPEMKFTSPVSGEVIAVNRGAKRKVLSIEVKPDGLNEYESFPVGDPSALSAEQIKELLLSSGMWGFIKQRPYDIVATPDIAPRDIYITANFTAPLAPDFDFIVRGEERALQTAIDALAKLTTGKVYVGLKPGSSLGLHNAEIVEVHGPHPAGNVGVLINHTKPINRGETVWTLKATDLIVIGRFLLTGKADFTRMIAMTGSDAAAHGYVRIMPGCNVFASFPGRLTIKESHERVIDGNVLTGKKLCEKEPFLSARCDQITVIPEGDDVDELFGWAAPRLDQYSMSRAYFSWLQGKNKEYVLDARIKGGERAMIMSNEYDRVFPMDIYPEYLLKAIIAFDIDKMEDLGIYEVAPEDFATCEFVDTSKIELQRIVREGLDMLYKEMN

SEQ ID NO: 109 - protein, 195 aa, Porphyromonas gingivalis
MDKVSYALGLSIGNNFKSSGIDSVVMDDFMQGLSDVLEEKAPQLSYDEAKREIEAYFMDLQQKAVKLNKEAGEEFLKINAHKEGVTTLPSGLQYEVIKMGEGPKPTLSDTVTCHYHGTLINGIVFDSSMDRGEPASFPLRGVIAGWTEILQLMPVGSKWKVTIPSDLAYGDRGAGEHIKPGSTLIFIIELLSINK

SEQ ID NO: 110 - protein, 273 aa, Porphyromonas gingivalis
MKKALLIGAALLGAVSFASAQSLSTIKVQNNSVQQPREEATIQVCGELAEQVDCIGTGNSAIIAAAAKFESDDLESYVGWEIMSVDFFPGYKACKYTSAVWADDMTILGQSEDSDPEMQTINNLALKTSVKIEAGKNYIVGYIANTAGGHPIGCDQGPAVDGYGDLVSISEDGGATFPPFESLHQAVPTLNYNIYVVVHLKKGEGVEAVLTNDKANAYVQNGVIYVAGANGRQVSLFDMNGKVVYTGVSETIAAPQKGMYILRVGAKSIKLAI

SEQ ID NO: 111 - protein, 554 aa, Porphyromonas gingivalis
MPRIMKLKIALRLLLATFAIVLFSPLAKAQMDIGGDDVLIETMSTLSGYSEDFYYKMAVADNGWIYVMLDFSRIYFDDVRLYRSKDGGATYQKLGSLGSLVPYDFDVSHCDFIVTGKDEDDINVWTVMTAFEYVGGTIGNGVLLMHRHDADINNTECVYKKDFPNNRLMGVAIASNYRAPSPYGLGGDPFALAVAVSGSGSDHSFLDYIFSLDGGVHFEQKRIYTRPQKLTINRVDLSLGSTSPSLGFNTWPLMGVVFEMNKNLDGFDIGFISNFVDYDPRYAWSEPIIIEEDCGWTDFNPLGALSIEIQMMLDDNSDNTVGGERSHNFLITYPGHYVYPKQSFNYSPGHTPTKKDLVFKHCIGIPALAYDKEGDRYLTTFQDHNLMRYRWIKYDDINSFYGWSWPYVYAKEAKDKKRRRPQVALNPTNGKACWVWHTRKSPYDETKPHPTPVIIKHFLWSDTEWVHALDVGDVLQKEGSMKLYPNPAKEYVLINLPKEGGHEAVVYDMQGRIVEKVSFSGKEYKLNVQYLSKGTYMLKVVADTEYFVEKIIVE

SEQ ID NO: 112 - protein, 550 aa, Porphyromonas gingivalis
MKLKIALRLLLATFAIVLFSPLAKAQMDIGGDDVLIETMSTLSGYSEDFYYKMAVADNGWIYVMLDFSRIYFDDVRLYRSKDGGATYQKLGSLGSLVPYDFDVSHCDFIVTGKDEDDINVWTVMTAFEYVGGTIGNGVLLMHRHDADINNTECVYKKDFPNNRLMGVAIASNYRAPSPYGLGGDPFALAVAVSGSGSDHSFLDYIFSLDGGVHFEQKRIYTRPQKLTINRVDLSLGSTSPSLGFNTWPLMGVVFEMNKNLDGFDIGFISNFVDYDPRYAWSEPIIIEEDCGWTDFNPLGALSIEIQMMLDDNSDNTVGGERSHNFLITYPGHYVYPKQSFNYSPGHTPTKKDLVFKHCIGIPALAYDKEGDRYLTTFQDHNLMRYRWIKYDDINSFYGWSWPYVYAKEAKDKKRRRPQVALNPTNGKACWVWHTRKSPYDETKPHPTPVIIKHFLWSDTEWVHALDVGDVLQKEGSMKLYPNPAKEYVLINLPKEGGHEAVVYDMQGRIVEKVSFSGKEYKLNVQYLSKGTYMLKVVADTEYFVEKIIVE

SEQ ID NO: 113 - protein, 390 aa, Porphyromonas gingivalis
MKRLLPFLLLAGLVAVGNVSAQSPRIPQVDVHTRIARNARYRLDKISVPDSRQIFDYFYKEETIPTKIQTTTGGAITSIDSLFYEDDRLVQVRYFDNNLELKQAEKYVYDGSKLVLREIRKSPTDETPIKKVSYHYLCGSDMPFEITTEMSDGYFESHTLNYLNGKIARIDIMTQQNPSAELIETGRMVYEFDANNDAVLLRDSVFLPLQNKWVEMFTHRYTYDNKHNCIRWEQDEFGTLTLANNFEYDTTIPLSSVLFPTHEEFFRPLLPNFMKHMRTKQTYFNNSGEGLSEVCDYNYFYTDMQGNALTDVAVNESIKIYPRPATDFLRIEGSQLLRLSLFDMNGKLIRATELTGDLAIIGVASLPRGTYIAEITAANSKTIRAKVSLR

SEQ ID NO: 114 - protein, 313 aa, Porphyromonas gingivalis
MRANIWQILSVSVLFFFGTAIGQAQSRNRTYEAYVKQYADEAIRQMSRYNIPASITIAQALVETGAGASTLASVHNNHFGIKCHKSWTGKRTYRTDDAPNECFRSYSAARESYEDHSRFLLQPRYRPLFKLDREDYRGWATGLQRCGYATNRGYANLLIKMVELYELYALDREKYPSWFHKSYPGSNKKSHQTTKQKQSGLKHEAYFSYGLLYIIAKQGDTFDSLAEEFDMRASKLAKYNDAPVDFPIEKGDVIYLEKKHACSISKHTQHVVRVGDSMHSISQRYGIRMKNLYKLNDKDGEYIPQEGDILRLR

SEQ ID NO: 115 - protein, 271 aa, Porphyromonas gingivalis
MNSRHLTITIIAGLSLFVLTLGGCSVAQQDTQWTLGGKLFTSAWIQRSAEYQALCIQAYNIATERVDALPAERKQGDRPYAIVTDIDETILDNTPNSVYQALRGKDYDEETWGKWCAQADADTLAGALSFFLHAANKGIEVFYVTNRRDNLREATLQNLQRYGFPFADEEHLLTTHGPSDKEPRRLKIQEQYEIVLLIGDNLGDFHHFFNTKEESGRKQALGLTAGEFGRHFIMLPNPNYGSWEPAWYGGKYPPLPERDKALKQLHSQNSR

SEQ ID NO: 116 - protein, 757 aa, Porphyromonas gingivalis
MRTKTIFFAIISFIALLSSSLSAQSKAVLTGSVSDAETGEPLAGARIEVKHTNIVAGADAGGHFEIKNLPAGQHTIICSLGGYGQKEEVVAIEAGQTKTISFALRLRTNNLEEVVVTGTGTRYRLVDAPVATEVLTAKDIASFSAPTSEALLQGLSPSFDFGPNLMGSFMQLNGLSSKYILILIDGKRVYGDVGGQADLSRISPDQIERIELVKGASSSLYGSDAIAGVINVITKKNTNRLSAYTSHRISKYNDRQTNTSLDINIGKFSSNTNYFFYHTDGWQNSPFEIKKKKGSGEPVLEETYKKTFRAQENQGVSQSLSYYATNNLSFSGNVQYNKRQIFTPTFSEKKAYDMDYRALTASLGTNYLFPNGLHTLSFDAVYDRFRFGYLYHDKDSSESLINNQGQTEQPTFFPGQLRNKNDQIRYTAEARGVFTLPYAQKLTGGLEYFREELISPYNLITDKADASTLSAYVQDEWKPLDWFNMTAGFRLVHHQEFGTRMTPKVSILAKYGPLNFRATYANGYKTPTLKELFARNELTTMGSHNLYLGNADLKPQMSDYYALGLEYNQGPISFSATVYDNELRNLISFMDIPTSPEHEAQGIKKTKQYANIGKARSRGLDVLCDASIGWGIKLGAGYSLVEAKNLQTDEWLEGAARHRANVHADWVHYWGQYRLGVSLFGRIQSERYYKDGNAPDYTLWRLATSHRFAHFRHIILDGTLGIDNLFDYVDDRPMGVNYATVTPGRTFFAQIAIRFNN

SEQ ID NO: 117 - protein, 331 aa, Porphyromonas gingivalis
MTDNKQRNIVFPAFLLLLGVIAVVTIVGFFMLRPAEEIIQGQIEVTEYRVSSKVPGRIKELRVSEGQQVQAGDTLAVIEAPDVAAKMEQAKAAEAAAQAQNAKALKGARSEQIQAAYEMWQKAQAGVAIATKTHQRVQNLYDQGVVPAQKLDEATAQRDAAIATQKAAEAQYNMARNGAEREDKLAASALVDRARGAVAEVESYINETYLIAPRAGEVSEIFPKAGELVGTGAPIMNIAEMGDMWASFAVREDFLSSMTMGAVLETVVPALNEEKVRFKITFIKNMGTYAAWKATKTTGQYDLKTFEVKATLADKDKAQKLRPGMSVIIRK

SEQ ID NO: 118 - protein, 1017 aa, Porphyromonas gingivalis
MKRMTLFFLCLLTSIGWAMAQNRTVKGTVISSEDNEPLIGANVVVVGNTTIGAATDLDGNFTLSVPANAKMLRVSYSGMTTKEVAIANVMKIVLDPDSKVLEQVVVLGYGTGQKLSTVSGSVAKVSSEKLAEKPVANIMDALQGQVAGMQVMTTSGDPTAVASVEIHGTGSLGASSAPLYIVDGMQTSLDVVATMNPNDFESMSVLKDASATSIYGARAANGVVFIQTKKGKMSERGRITFNASYGISQILNTKPLDNMMTGDELLDFQVKAGFWGNNQTVQKVKDMILAGAEDLYGNYDSLKDEYGKTLFPVDFNHDADWLKALFKTAPTSQGDISFSGGSQGTSYYASIGYFDQEGMAREPANFKRYSGRLNFESRINEWLKVGANLSGAIANRRSADYFGKYYMGSGTFGVLTMPRYYNPFDVNGDLADVYYMYGATRPSMTEPYFAKMRPFSSESHQANVNGFAQITPIKGLTLKAQAGVDITNTRTSSKRMPNNPYDSTPLGERRERAYRDVSKSFTNTAEYKFSIDEKHDLTALMGHEYIEYEGDVIGASSKGFESDKLMLLSQGKTGNSLSLPEHRVAEYAYLSFFSRFNYGFDKWMYIDFSVRNDQSSRFGSNNRSAWFYSVGGMFDIYNKFIQESNWLSDLRLKMSYGTTGNSEIGNYNHQALVTVNNYTEDAMGLSISTAGNPDLSWEKQSQFNFGLAAGAFNNRLSAEVDFYVRTTNDMLIDVPMPYISGFFSQYQNVGSMKNTGVDLSLKGTIYQNKDWNVYASANFNYNRQEITKLFFGLNKYMLPNTGTIWEIGYPNSFYMAEYAGIDKKTGKQLWYVPGQVDADGNKVTTSQYSADLETRIDKSVTPPITGGFSLGASWKGLSLDADFAYIVGKWMINNDRYFTENAGGLMQLNKDKMLLNAWTEDNKETDVPKLGQSPQFDTHLLENASFLRLKNLKLTYVLPNSLFAGQNVIGGARVYLMARNLLTVTKYKGFDPEAGGNVGKNQYPNSKQYVAGIQLSF

SEQ ID NO: 119 - protein, 1014 aa, Porphyromonas gingivalis
MTLFFLCLLTSIGWAMAQNRTVKGTVISSEDNEPLIGANVVVVGNTTIGAATDLDGNFTLSVPANAKMLRVSYSGMTTKEVAIANVMKIVLDPDSKVLEQVVVLGYGTGQKLSTVSGSVAKVSSEKLAEKPVANIMDALQGQVAGMQVMTTSGDPTAVASVEIHGTGSLGASSAPLYIVDGMQTSLDVVATMNPNDFESMSVLKDASATSIYGARAANGVVFIQTKKGKMSERGRITFNASYGISQILNTKPLDNMMTGDELLDFQVKAGFWGNNQTVQKVKDMILAGAEDLYGNYDSLKDEYGKTLFPVDFNHDADWLKALFKTAPTSQGDISFSGGSQGTSYYASIGYFDQEGMAREPANFKRYSGRLNFESRINEWLKVGANLSGAIANRRSADYFGKYYMGSGTFGVLTMPRYYNPFDVNGDLADVYYMYGATRPSMTEPYFAKMRPFSSESHQANVNGFAQITPIKGLTLKAQAGVDITNTRTSSKRMPNNPYDSTPLGERRERAYRDVSKSFTNTAEYKFSIDEKHDLTALMGHEYIEYEGDVIGASSKGFESDKLMLLSQGKTGNSLSLPEHRVAEYAYLSFFSRFNYGFDKWMYIDFSVRNDQSSRFGSNNRSAWFYSVGGMFDIYNKFIQESNWLSDLRLKMSYGTTGNSEIGNYNHQALVTVNNYTEDAMGLSISTAGNPDLSWEKQSQFNFGLAAGAFNNRLSAEVDFYVRTTNDMLIDVPMPYISGFFSQYQNVGSMKNTGVDLSLKGTIYQNKDWNVYASANFNYNRQEITKLFFGLNKYMLPNTGTIWEIGYPNSFYMAEYAGIDKKTGKQLWYVPGQVDADGNKVTTSQYSADLETRIDKSVTPPITGGFSLGASWKGLSLDADFAYIVGKWMINNDRYFTENAGGLMQLNKDKMLLNAWTEDNKETDVPKLGQSPQFDTHLLENASFLRLKNLKLTYVLPNSLFAGQNVIGGARVYLMARNLLTVTKYKGFDPEAGGNVGKNQYPNSKQYVAGIQLSF

SEQ ID NO: 120 - protein, 821 aa, Porphyromonas gingivalis
MKKKNFLLLGIFVALLTFIGSMQAQQAKDYFNFDERGEAYFSFKVPDRAVLQELALIMSIDEFDPVTNEAIAYASEEEFEAFLRYGLKPTFLTPPSMQRAVEMFDYRSGEKYEWNAYPTYEAYISMMEEFQTKYPSLCTTSVIGKSVKDRKLMICKLTSSANTGKKPRVLYTSTMHGDETTGYVVLLRLIDHLLSNYESDPRIKNILDKTEVWICPLTNPDGAYRAGNHTVQGATRYNANNVDLNRNFKDDVAGDHPDGKPWQPEATAFMDLEGNTSFVLGANIHGGTEVVNYPWDNKKERHADDEWYKLISRNYAAACQSISASYMTSETNSGIINGSDWYVIRGSRQDNANYFHRLREITLEISNTKLVPASQLPKYWNLNKESLLALIEESLYGIHGTVTSAANGQPLKCQILIENHDKRNSDVYSDATTGYYVRPIKAGTYTVKYKAEGYPEATRTITIKDKETVIMDIALGNSVPLPVPDFTASPMTISVGESVQFQDQTTNNPTNWEWTFEGGQPAMSTEQNPLVSYSHPGQYDVTLKVWNASGSNTITKEKFITVNAVMPVAEFVGTPTEIEEGQTVSFQNQSTNATNYVWIFDGGTPATSEDENPTVLYSKAGQYDVTLKAISASGETVKTKEKYITVKKAPVPAPVADFEGTPRKVKKGETVTFKDLSTNNPTSWLWVFEGGSPATSTEQNPVVTYNETGKYDVQLTATNEGGSNVKKAEDYIEVILDDSVEDIVAQTGIVIRPQNGTKQILIEANAAIKAIVLYDINGRVVLKTTPNQLRSTVDLSILPEGIYTINIKTEKSARTEKIHIG

SEQ ID NO: 121 - protein, 76 aa, Porphyromonas gingivalis
MRLIKAFLVQLLLLPIFFYKRFISPLTPPSCRFTPSCSSYAIEALRKYGPGKGLLLSIKRILRCHPWGGSGYDPVP

SEQ ID NO: 122 - protein, 417 aa, Porphyromonas gingivalis
MNYLYILITLLLSGFFSGAEIAFLSSDKLRLELDRNRGDLTGRALNLLYRHPDQLVTTLLVGNNIVLVVYGLLMAGLLAAPLAQWIDNDAMIVVLQSVLSTIIILFTGEFLPKAIFKTNANMMMRVFALPIVAIYYLLYPLSKLFTGLSRSFIRLVDKNYVPTTVGLGRVDLDHYLAENMSGENEQNDLTTEVKIIQNALDFSGIQVRDCMIPRNEMIACELQTDIEVLKTTFIDTGLSKIIIYRQNIDDVVGYIHSSEMFRGQDWQKRINTTVFVPESMYANKLMRLLMQRKKSIAIVIDELGGTAGMVTLEDLVEEIFGDIEDEHDTRKIIAKQLGPHTYLVSGRMEIDDVNERFGLSLPESDDYLTVAGFILNSHQNIPQANEVVEIAPYTFTILRSSSTKIELVKMSIDDQSN

SEQ ID NO: 123 - protein, 293 aa, Porphyromonas gingivalis
MKQNYFKRVCSLLWLVLPMLIMPLEVAAQEIIPNEEVLESLTFVAPVEETDAIEAEVEALQEIVATEEIAEQAVRSYTYTVYRDGVKIASGLTEPTFLDEDVPAGEHTYCVEVQYQGGVSDKVCVDVEVKDFKPVTNLTGTASNDEVSLDWDGVEEKAEEPASDKAVSYNVYKNGTLIGNTAETHYVETGVANGTYIYEVEVKYPDGVSPKVAVTVTVTNSSLSNVDGQAPYTLRVEGKKIIAEAHGMITLYDINGRTVAVAPNRLEYMAQTGFYAVRFDVGNKHHVSKIQVR

SEQ ID NO: 124 - protein, 312 aa, Porphyromonas gingivalis
MIPLSESFESGIPAIWKTIDADGDGYNWMHLTNFTGQSGLCVSSASYIGGVGALTPDNYLITPELKLPTDALVEIIYWVCTQDLTAPSEHYAVYSSSTGNNAADFVNLLYEETLTAKRIQSPELIRGNRTQGVWYQRKVVLPNDTKYVAFRHFNSTDNFWLNLDEVSILYTPLPRRAPCPHPGGYTYSVFRDGQKIASGLSALAYIDTDVPYGTQDYCVQVNYLQGDSYKVCKNIVVANSANIYGADKPFALTVVGKTIVASAFKGEITLYDIRGRLIASGCDTLRYKAENGFYLIKIQVNGTVYTEKIQIQ

SEQ ID NO: 125 - protein, 843 aa, Porphyromonas gingivalis
MKKSFLLAIVMLFGIAMQGHSAPVTKERALSLARLALRQVSLRMGQTAVSDKISIDYVYRQGDAERGITSQEEGSPAYFYVANRGNNEGYALVAADDRIPTILAYSPIGRFDMDSMPDNLRMWLQIYDQEIGLILSGKAQLNEEILRTEGVPAEVHALMDNGHFANDPMRWNQGYPWNNKEPLLPNGNHAYTGCVATAAAQIMRYHSWPLQGEGSFDYHAGSLVGNWSGTFGEMYDWINMPGNPDLDNLTQSQVDAYATLMRDVSASVSMSFYENGSGTYSVYVVGALRNNFRYKRSLQLHVRALYTSQEWHDMIRGELASGRPVYYAGNNQSIGHAFVCDGYASDGTFHFNWGWGGVSNGFYKLTLLSPTSLGIGGEGIGFTIYQEIITGIEPAKTPAEAGTDALPILALKDIEAEYKSESGLNVGYSIYNTGEEQSNLDLGYRLNKADGEVIEVKTSSINISWYGYGEHPESFSLAPNQLSQGINTITLLYRRTGTEQWEPVRHAQGGYVNSIKVNTTDPNNVVVTVDNNEGKLSIVPNSFVADLNSYEHSTITVQFNSDSPDEIRTPVAFALSTGATADDVISLGWVMAEVPGGSSNYPVVWSKDVLTLSEGDYTLWYRFSINNQKDEWKKIGSVSVKTPTEYTHPLFEVGHNQTSTYTLDMAHNRVLPDFTLKNLGLPFNGELVVVFRQTQSSSGSLWAAQETVHIKQGETFVYKPVVEGPIPDGSYRATLHAFVNGQQQLYLKGKRNYTVKIVNGTAVEAIESSEEIRVFPNPARDYVEISAPCIPQETSIILFDLSGKIVMKNSLSAGHGRMDVSRLPNGAYILKVDGYTTKINIVH

SEQ ID NO: 126 - protein, 290 aa, Porphyromonas gingivalis
MKKLFLSLTSLVMVFAVASCDIIDKDQTLLPAPTNVTPDNPDDNPSEIDITQTHTEKYVLAEEFTGQKCLNCPKGHRKLAALKEQYGKRLTVVGIHAGPGSLVPPLFRTEAGDAYYSKFANNTPLPALMVSRKKFGSSYVYDKSYKTWDVPIAEQMEQKAKINIFAVAEYTDTQKIKVTVKGKILEGNTLPKSMVQVYLLEDKLIAPQVDGNTTVENYEHNHVLRGAVNGIWGEEFVNLKDYLYTYAVEPLSGMSFVAENYSIVAFVYDVQTFEVYDVVHVKINPQSDGK

SEQ ID NO: 127 - protein, 223 aa, Porphyromonas gingivalis
MKKSSVVASVLAVALVFAGCGLNNMAKGGLIGAGVGGAIGAGVGNVAGNTAVGAIVGTAVGGAAGALIGKKMDKQKKELEAAVPDATIQTVNDGEAILVTFDSGILFATNSSTLSPNSRTALTKFAANMNKNPDTDIRIVGHTDNTGSDKINDPLSERRAASVYSFLNSQGVSMSRMAAEGRGSHEPVADNSTVAGRSANRRVEVYILPNAKMIEQAQQGTLK

SEQ ID NO: 128 - protein, 672 aa, Porphyromonas gingivalis
MYSGHHKIHYPFLILLVCLAFAACKSVKLKDAEKAHDRQEYTKAADMYNTLYRRTRRKQVEMKAYTAFRSGENYRAAGRQAKALRGYLNARRYGYPDSVVLLRLAQTYQQGGNYKEAEVLFRGYLEAYPKSYFAAIGLEGCLFARQQKEYPTRYRIRRAAEWNSARGDFGPAYAPDASALYFTSSRSKDDGLDNSSITGLKPNDIYIIKRDAQGRWGRPDSVSGGINTPWDEGVPTITPDGSTIYYTLAQQGADYDRTVQIYSAARSGEGGWSNGSLVDIMRDSLRMAAHPSMSASGDYLYFVSNIGGSYGGKDIYRVKVSDRSYGSPENLGPDINTPGDEMFPFIDGDSTLFFASDGHAGLGGLDIFKATLDSTGQWHVVNMGQPVNSSADDFGLAVEPKGKNKEEALPDNGVKGVFCSNRGDARGWPHLFHFELPAIYTEIQGYVMDREENPIAGATVRIVGERGPVGQGFVTTRDDGSYKMSVQGDTRYVMLAGASGYLNQYVELKTDTAKQSETYYVDFFLASREKAEGLQNIFYDFDKATLRPESMKSLDELIRILTDNPDIRIELGSHADRKGPDAYNLGLSDRRAKSVVDYLTSRGIAADRLTWKGYGKSVPKTVTAKIAERHDFLKEGDVLTEEFVAPLTEEQQSVCDQLNRRTEFRVIEEELR

SEQ ID NO: 129 - protein, 315 aa, Porphyromonas gingivalis
MIRTILSRYVSSNFWSRGATFFFTIFPAFILAATALPACGGGTASGSDRTLAVTIEPQKYFIESIADKSVQVVALVPAGSNPEEYDPSPTVMKRLSEADAYFYIGGLGFEQRNLAAIRDNNPKLPLFEMGKALADAGSADLHGSCTDHSHTDLHAHDPHYWSSVVGAKALSRAAYDALVELYPNEKDKWDKGHDRLNGRIDSVKRLVDTMFANGKADKAFVIYHPSLSFFAQEFGLRQIVIEEDGKEPTAAHLRRVIDQARADGVRIVFIQPEFETRQAEDIAREIGARPVRINPLRSSWEEEILHIARALAHER

SEQ ID NO: 130 - protein, 940 aa, Porphyromonas gingivalis
MNKFYKSLLQSGLAAFVSMATALTASAQISFGGEPLSFSSRSAGTHSFDDAMTIRLTPDFNPEDLIAQSRWQSQRDGRPVRIGQVIPVDVDFASKASHISSIGDVDVYRLQFKLEGAKAITLYYDAFNIPEGGRLYIYTPDHEIVLGAYTNATHRRNGAFATEPVPGSELIMDYEVSRGGTLPDIKISGAGYIFDKVGGRPVTDNHYGIGEDDSDSDCEININCPEGADWQAEKNGVVQMIMVKGQYISMCSGNLLNNTKGDFTPLIISAGHCASITTNFGVTQSELDKWIFTFHYEKRGCSNGTLAIFRGNSIIGASMKAFLPIKGKSDGLLLQLNDEVPLRYRVYYNGWDSTPDIPSSGAGIHHPAGDAMKISILKKTPALNTWISSSGSGGTDDHFYFKYDQGGTEGGSSGSSLFNQNKHVVGTLTGGAGNCGGTEFYGRLNSHWNEYASDGNTSRMDIYLDPQNNGQTTILNGTYRDGYKPLPSVPRLLLQSTGDQVELNWTAVPADQYPSSYQVEYHIFRNGKEIATTKELSYSDAIDESIIGSGIIRYEVSARFIYPSPLDGVESYKDTDKTSADLAIGDIQTKLKPDVTPLPGGGVSLSWKVPFLSQLVSRFGESPNPVFKTFEVPYVSAAAAQTPNPPVGVVIADKFMAGTYPEKAAIAAVYVMPSAPDSTFHLFLKSNTNRRLQKVTTPSDWQAGTWLRINLDKPFPVNNDHMLFAGIRMPNKYKLNRAIRYVRNPDNLFSITGKKISYNNGVSFEGYGIPSLLGYMAIKYLVVNTDAPKIDMSLVQEPYAKGTNVAPFPELVGIYVYKNGTFIGTQDPSVTTYSVSDGTESDEYEIKLVYKGSGISNGVAQIENNNAVVAYPSVVTDRFSIKNAHMVHAAALYSLDGKQVRSWNNLRNGVTFSVQGLTAGTYMLVMQTANGPVSQKIVKQ

SEQ ID NO: 131 - protein, 925 aa, Porphyromonas gingivalis
MAIMMKSIVFRAFLTILLSWAAITNPTAQEISGMNASCLAAPAQPDTILYESFENGPVPNGWLEIDADADGATWGSPSGSFSVPYGHNGLCTYSHIRSGISTAGNYLITPNIEGAKRVKYWVCNQYSTNPEHYAVMVSTTGTAIEDFVLLFDDSITGKPTPLVWRRRIVDLPEGTKYIAWRHYKVTDSHTEFLKLDDVTVYRSIEGPEPATDFTVINIGQNVGRLTWNYPEDYQPEGKGNEELQLSGYNIYANGTLLAQIKDVSILEYVDSTYSLRDNPLQVEYCVTAVYDESIESSTVCGTLHYATDAILYENFENGPVPNGWLVIDADGDGFSWGHYLNAYDAFPGHNGGHCSLSASYVPGIGPVTPDNYLITPKVEGAKRVKYWVSTQDANWAAEHYAVMASTTGTAVGDFVILFEETMTAKPTGAWYERTINLPEGTKYIAWRHYNCTDIYFLKLDDITVFGTPASEPEPVTDFVVSLIENNKGRLKWNYPNGYEPDKTDDKDPLQLAGYNIYANGSLLVHIQDPTVLEYIDETYSSRDDQVEVEYCVTAVYNDNIESQSVCDKLIYDSQSDIILYEGFEAGSIPEGWLLIDADGDNVNWDYYPWTMYGHDSEKCIASPSYLPMIGVLTPDNYLVTPRLEGAKLVKYWVSAQDAVYSAEHYAVMVSTTGTAVEDFVLLFEETMTAKANGAWYERTITLPAGTKYIAWRHYDCTDMFFLLLDDITVYRSTETVPEPVTDFVVSLIENNKGRLKWNYPNGYEPDKTDDKKPLQLTGYNIYANGSLLVHIQDPTVLEYIDETYSSRDGQVEMEYCVTAVYNDNIESQSVCDKLNYTITSLDNIQSDTSLKIYPNPASYVVRIEGLSRSKSTIELYNALGICILREETHSEKTEIDVSRLNDGVYLIKVVGGNKTTTEKVEIKRP

SEQ ID NO: 132 - protein, 922 aa, Porphyromonas gingivalis
MMKSIVFRAFLTILLSWAAITNPTAQEISGMNASCLAAPAQPDTILYESFENGPVPNGWLEIDADADGATWGSPSGSFSVPYGHNGLCTYSHIRSGISTAGNYLITPNIEGAKRVKYWVCNQYSTNPEHYAVMVSTTGTAIEDFVLLFDDSITGKPTPLVWRRRIVDLPEGTKYIAWRHYKVTDSHTEFLKLDDVTVYRSIEGPEPATDFTVINIGQNVGRLTWNYPEDYQPEGKGNEELQLSGYNIYANGTLLAQIKDVSILEYVDSTYSLRDNPLQVEYCVTAVYDESIESSTVCGTLHYATDAILYENFENGPVPNGWLVIDADGDGFSWGHYLNAYDAFPGHNGGHCSLSASYVPGIGPVTPDNYLITPKVEGAKRVKYWVSTQDANWAAEHYAVMASTTGTAVGDFVILFEETMTAKPTGAWYERTINLPEGTKYIAWRHYNCTDIYFLKLDDITVFGTPASEPEPVTDFVVSLIENNKGRLKWNYPNGYEPDKTDDKDPLQLAGYNIYANGSLLVHIQDPTVLEYIDETYSSRDDQVEVEYCVTAVYNDNIESQSVCDKLIYDSQSDIILYEGFEAGSIPEGWLLIDADGDNVNWDYYPWTMYGHDSEKCIASPSYLPMIGVLTPDNYLVTPRLEGAKLVKYWVSAQDAVYSAEHYAVMVSTTGTAVEDFVLLFEETMTAKANGAWYERTITLPAGTKYIAWRHYDCTDMFFLLLDDITVYRSTETVPEPVTDFVVSLIENNKGRLKWNYPNGYEPDKTDDKKPLQLTGYNIYANGSLLVHIQDPTVLEYIDETYSSRDGQVEMEYCVTAVYNDNIESQSVCDKLNYTITSLDNIQSDTSLKIYPNPASYVVRIEGLSRSKSTIELYNALGICILREETHSEKTEIDVSRLNDGVYLIKVVGGNKTTTEKVEIKRP

SEQ ID NO: 133 - protein, 921 aa, Porphyromonas gingivalis
MKSIVFRAFLTILLSWAAITNPTAQEISGMNASCLAAPAQPDTILYESFENGPVPNGWLEIDADADGATWGSPSGSFSVPYGHNGLCTYSHIRSGISTAGNYLITPNIEGAKRVKYWVCNQYSTNPEHYAVMVSTTGTAIEDFVLLFDDSITGKPTPLVWRRRIVDLPEGTKYIAWRHYKVTDSHTEFLKLDDVTVYRSIEGPEPATDFTVINIGQNVGRLTWNYPEDYQPEGKGNEELQLSGYNIYANGTLLAQIKDVSILEYVDSTYSLRDNPLQVEYCVTAVYDESIESSTVCGTLHYATDAILYENFENGPVPNGWLVIDADGDGFSWGHYLNAYDAFPGHNGGHCSLSASYVPGIGPVTPDNYLITPKVEGAKRVKYWVSTQDANWAAEHYAVMASTTGTAVGDFVILFEETMTAKPTGAWYERTINLPEGTKYIAWRHYNCTDIYFLKLDDITVFGTPASEPEPVTDFVVSLIENNKGRLKWNYPNGYEPDKTDDKDPLQLAGYNIYANGSLLVHIQDPTVLEYIDETYSSRDDQVEVEYCVTAVYNDNIESQSVCDKLIYDSQSDIILYEGFEAGSIPEGWLLIDADGDNVNWDYYPWTMYGHDSEKCIASPSYLPMIGVLTPDNYLVTPRLEGAKLVKYWVSAQDAVYSAEHYAVMVSTTGTAVEDFVLLFEETMTAKANGAWYERTITLPAGTKYIAWRHYDCTDMFFLLLDDITVYRSTETVPEPVTDFVVSLIENNKGRLKWNYPNGYEPDKTDDKKPLQLTGYNIYANGSLLVHIQDPTVLEYIDETYSSRDGQVEMEYCVTAVYNDNIESQSVCDKLNYTITSLDNIQSDTSLKIYPNPASYVVRIEGLSRSKSTIELYNALGICILREETHSEKTEIDVSRLNDGVYLIKVVGGNKTTTEKVEIKRP

SEQ ID NO: 134 - protein, 324 aa, Porphyromonas gingivalis
MCLEPIIAPISSELLEQELTADRFLRMTNKAGNEIYVFTAEEAPHCMKEVGRLREEAFRHYGGGTGKAIDIDEFDTMPGSYKQLIVWDPQNKAILGGYRFIYGRDVAFDTDGKPLLATAEMFRFSDAFLHDYLPYTVELGRSFVSLQYQSTRMGTKAIFVLDNLWDGIGALTVVNPEALYFYGKVTMYKDYDRRARNLILYFLRKHFSDPEGLVKPIHPLPIEISAEDEALFSSSDFDTNYKTLNIEVRKLGINIPPLVSAYIALSPEMRVFGTAVNESFGEVEETGIFIAVGKILEEKKQRHIESFILSRNEKKGLDSSNGRS

SEQ ID NO: 135 - protein, 1226 aa, Porphyromonas gingivalis
  misc_feature (983)..(983): Xaa can be any naturally occurring amino acid
MMKRYTIILAVFLLFCTVFTFQIKARPYERFADVEKPWIQKHSMDSKLVPANKGNLIQAEIVYQSVSEHSDLVISPVNEIRPANRFPSHRKSFFAENLRASPPVVPVAVDKYAVPVANPMDPENPNAWDVTLKITTKAVTVPVDVVMVIDQSSSMGGQNIARLKSAIASGQRFVKKMLPKGTATEGVRIALVSYDHEPHRLSDFTKDTAFLCQKIRALTPIWGTHTQGGLKMARNIMATSTAVDKHIILMSDGLATEQYPVKNVTTADFIGKTGNANDPIDLVIQGAINFPTNYVSNNPSTPLTPNYPTHSSKVGRRNLPESKFDYSNLSARITFDGVAGALVYEPRFPHPYYYYFPCNAAINEAQFAKNSGYTIHTIGYDLGDFALANNSLKLTATDENHFFTATPANLAAAFDNIAQTINIGIQRGEVTDFVAPGFIVKNLTQSGDVTHLLNVSNGTVHYDVSTKKLTWTTGTILSSSEATITYRIYADLDYIQNNDIPVNTTSAIGPDLGGFDTNTEAKLTYTNSNGEPNQQLIFPRPTVKLGYGVIKRHYVLVNKDGQPIQANGTVVSSLSEAHVLQSQDFFLPSGGGHIVPKWIKLDKTTEALQYYSVPPTNTVITTADGKRYRFVEVPGSTPNPGQIGISWKKPAGNAYFAYKLLNYWMGGTTDQQSEWDVTSNWTGAQVPLTGEDVEFATTENFGSPAVADLHVPTTNPKIIGNLINNSDKDLVVTTSSQLTINGVVEDNNPNVGTIVVKSSKDNPTGTLLFANPGYNQNVGGTVEFYNQGYDCADCGMYRRSWQYFGIPVNESGFPINDVGGNETVNQWVEPFNGDKWRPAPYAPDTELQKFKGYQITNDVQAQPTGVYSFKGMICVCDAFLNLTRTSGVNYSGANLIGNSYTGAIDIKQGIVFPPEVEQTVYLFNTGTRDQWRKLNGSTVSGYRAGQYLSVPKNTAGQDNLPDRIPSMHSFLVKMQNGASCTLXILYDKLLKNTTVNNGNGTQITWRSGNSGSANMPSLVMDVLGNESADRLWIFTDGGLSFGFDNGWDGRKLTEKGLSQLYAMSDIGNDKFQVAGVPELNNLLIGFDADKDGQYTLEFALSDHFAKGAVYLHDLQSGAKHRITNSTSYSFDAKRGDSGARFRLSYGCDENVDDSHVVSTNGREIIILNQDALDCTVTLFTIEGKLLRRLKVLAGHREVMKVQTGGAYIVHLQNAFTNDVHKVLVEY

SEQ ID NO: 136 - protein, 1225 aa, Porphyromonas gingivalis
  misc_feature (982)..(982): Xaa can be any naturally occurring amino acid
MKRYTIILAVFLLFCTVFTFQIKARPYERFADVEKPWIQKHSMDSKLVPANKGNLIQAEIVYQSVSEHSDLVISPVNEIRPANRFPSHRKSFFAENLRASPPVVPVAVDKYAVPVANPMDPENPNAWDVTLKITTKAVTVPVDVVMVIDQSSSMGGQNIARLKSAIASGQRFVKKMLPKGTATEGVRIALVSYDHEPHRLSDFTKDTAFLCQKIRALTPIWGTHTQGGLKMARNIMATSTAVDKHIILMSDGLATEQYPVKNVTTADFIGKTGNANDPIDLVIQGAINFPTNYVSNNPSTPLTPNYPTHSSKVGRRNLPESKFDYSNLSARITFDGVAGALVYEPRFPHPYYYYFPCNAAINEAQFAKNSGYTIHTIGYDLGDFALANNSLKLTATDENHFFTATPANLAAAFDNIAQTINIGIQRGEVTDFVAPGFIVKNLTQSGDVTHLLNVSNGTVHYDVSTKKLTWTTGTILSSSEATITYRIYADLDYIQNNDIPVNTTSAIGPDLGGFDTNTEAKLTYTNSNGEPNQQLIFPRPTVKLGYGVIKRHYVLVNKDGQPIQANGTVVSSLSEAHVLQSQDFFLPSGGGHIVPKWIKLDKTTEALQYYSVPPTNTVITTADGKRYRFVEVPGSTPNPGQIGISWKKPAGNAYFAYKLLNYWMGGTTDQQSEWDVTSNWTGAQVPLTGEDVEFATTENFGSPAVADLHVPTTNPKIIGNLINNSDKDLVVTTSSQLTINGVVEDNNPNVGTIVVKSSKDNPTGTLLFANPGYNQNVGGTVEFYNQGYDCADCGMYRRSWQYFGIPVNESGFPINDVGGNETVNQWVEPFNGDKWRPAPYAPDTELQKFKGYQITNDVQAQPTGVYSFKGMICVCDAFLNLTRTSGVNYSGANLIGNSYTGAIDIKQGIVFPPEVEQTVYLFNTGTRDQWRKLNGSTVSGYRAGQYLSVPKNTAGQDNLPDRIPSMHSFLVKMQNGASCTLXILYDKLLKNTTVNNGNGTQITWRSGNSGSANMPSLVMDVLGNESADRLWIFTDGGLSFGFDNGWDGRKLTEKGLSQLYAMSDIGNDKFQVAGVPELNNLLIGFDADKDGQYTLEFALSDHFAKGAVYLHDLQSGAKHRITNSTSYSFDAKRGDSGARFRLSYGCDENVDDSHVVSTNGREIIILNQDALDCTVTLFTIEGKLLRRLKVLAGHREVMKVQTGGAYIVHLQNAFTNDVHKVLVEY

SEQ ID NO: 137 - protein, 391 aa, Porphyromonas gingivalis
MIIKKMLKNKLAPLAILFLFAPKAMKAQEQLNVVHTSVPSLNISPDARAAGMGDIGVATTPDAYSQYWNPSKYAFMDTKAGISFSYTPWLSKLVNDIALMQMTGFYKLGTDENQAISASLRYFTLGKLETFDELGESMGEAHPNEFAVDLGYSRQLSENFSMAVALRYIRSDQSTHNTGENQAGNAFAADIAGYLQKYVLLGNAESLWSLGFNVKNIGTKISYDGGVTSFFIPTSLNLGTGLLYPIDDYNSINFNLELSKLLVPTPPIMDQNDQAGYEAALKKYQETSSISGIFSSFGDAPGGLKEEFREITWGLGAEYSYDDKFFVRAGYSYLHPTKGNLQYFTAGAGFKMNIFRIDASYLLSTIQSNPLDQTLRFTLAFDMDGLRNLFH

SEQ ID NO: 138 - protein, 446 aa, Porphyromonas gingivalis
MKTTVQQIILCLALMMSGVLGGNAQSFWEEIAPPFISNEPNVKYIIPNMGIDSKGTIYVTVTKRIQQGANYTSEQLGMYYRPLGDNEQWWKHDPYFDDKIVADIQTDAYGRVYVCTTSSRDQEYQLYINEQNEWRCIFKTSVSTYEHGMAVFRSSTGVTYIGTRHHIFASGVNDFEFNTIYEDSTPMSCRFAEATNSGTIYLALMHETTMSTTILTYQNGEFVDISESELSNSIIASMCSNKEGDIIALVTSYTGFMSGTLAIRKADEGKWQLVGGDIQNAIVQNICMMDDNKIACEVFGTPNGVDGRTRVCVSDASVFDFEWYEDEIYGGLIFDTFFYSPWDKLLYAKFGGIMLRSKESFITSFISPTVVQGVDVYTLAGKIRIESETPVSEVLLFDLAGRMVLRQTIDNKIYSDIDTNGLKRSGIYVVSVRLSSGQVFSHKVQV

SEQ ID NO: 139 - protein, 599 aa, Porphyromonas gingivalis
MENLKNIQPREDFNWEEFEAGGVHAAVSRQEQEAAYDKTLNTIKEKEVVMGRVTAINKREVVINVGYKSEGVVPATEFRYNPELKVGDEVEVYIENQEDKKGQLVLSHRKGRAARSWERVNEALEKDEIVKGYVKCRTKGGMIVDVFGIEAFLPGSQIDVRPIRDYDAFVEKTMEFKIVKINQEYKNVVVSHKVLIEAELEQQKKEIIGKLEKGQVLEGIVKNITSYGVFIDLGGVDGLIHITDLSWGRVAHPEEIVQLDQKINVVILDFDEDRKRIALGLKQLMPHPWDALDSELKVGDKVKGKVVVMADYGAFVEIAQGVEGLIHVSEMSWTQHLRSAQDFLHVGDEVEAVILTLDREERKMSLGLKQLKPDPWADIETRFPVGSRHHARVRNFTNFGVFVEIEEGVDGLIHISDLSWTKKIKHPSEFTEVGADIEVQVIEIDKENRRLSLGHKQLEENPWDVFETVFTVGSIHEGTVIEVMDKGAVVSLPYGVEGFATPKHMVKEDGSQAVLEEKLPFKVIEFNKDAKRIIVSHSRVFEDEQKMAQREANAERKAEAKAAQKEAAAEAANPAQAVEKATLGDLGELAALKEKLSEN

SEQ ID NO: 140 - protein, 550 aa, Porphyromonas gingivalis
MGRVTAINKREVVINVGYKSEGVVPATEFRYNPELKVGDEVEVYIENQEDKKGQLVLSHRKGRAARSWERVNEALEKDEIVKGYVKCRTKGGMIVDVFGIEAFLPGSQIDVRPIRDYDAFVEKTMEFKIVKINQEYKNVVVSHKVLIEAELEQQKKEIIGKLEKGQVLEGIVKNITSYGVFIDLGGVDGLIHITDLSWGRVAHPEEIVQLDQKINVVILDFDEDRKRIALGLKQLMPHPWDALDSELKVGDKVKGKVVVMADYGAFVEIAQGVEGLIHVSEMSWTQHLRSAQDFLHVGDEVEAVILTLDREERKMSLGLKQLKPDPWADIETRFPVGSRHHARVRNFTNFGVFVEIEEGVDGLIHISDLSWTKKIKHPSEFTEVGADIEVQVIEIDKENRRLSLGHKQLEENPWDVFETVFTVGSIHEGTVIEVMDKGAVVSLPYGVEGFATPKHMVKEDGSQAVLEEKLPFKVIEFNKDAKRIIVSHSRVFEDEQKMAQREANAERKAEAKAAQKEAAAEAANPAQAVEKATLGDLGELAALKEKLSEN

SEQ ID NO: 141 - protein, 458 aa, Porphyromonas gingivalis
MIVDVFGIEAFLPGSQIDVRPIRDYDAFVEKTMEFKIVKINQEYKNVVVSHKVLIEAELEQQKKEIIGKLEKGQVLEGIVKNITSYGVFIDLGGVDGLIHITDLSWGRVAHPEEIVQLDQKINVVILDFDEDRKRIALGLKQLMPHPWDALDSELKVGDKVKGKVVVMADYGAFVEIAQGVEGLIHVSEMSWTQHLRSAQDFLHVGDEVEAVILTLDREERKMSLGLKQLKPDPWADIETRFPVGSRHHARVRNFTNFGVFVEIEEGVDGLIHISDLSWTKKIKHPSEFTEVGADIEVQVIEIDKENRRLSLGHKQLEENPWDVFETVFTVGSIHEGTVIEVMDKGAVVSLPYGVEGFATPKHMVKEDGSQAVLEEKLPFKVIEFNKDAKRIIVSHSRVFEDEQKMAQREANAERKAEAKAAQKEAAAEAANPAQAVEKATLGDLGELAALKEKLSEN

SEQ ID NO: 142 - protein, 426 aa, Porphyromonas gingivalis
MEFKIVKINQEYKNVVVSHKVLIEAELEQQKKEIIGKLEKGQVLEGIVKNITSYGVFIDLGGVDGLIHITDLSWGRVAHPEEIVQLDQKINVVILDFDEDRKRIALGLKQLMPHPWDALDSELKVGDKVKGKVVVMADYGAFVEIAQGVEGLIHVSEMSWTQHLRSAQDFLHVGDEVEAVILTLDREERKMSLGLKQLKPDPWADIETRFPVGSRHHARVRNFTNFGVFVEIEEGVDGLIHISDLSWTKKIKHPSEFTEVGADIEVQVIEIDKENRRLSLGHKQLEENPWDVFETVFTVGSIHEGTVIEVMDKGAVVSLPYGVEGFATPKHMVKEDGSQAVLEEKLPFKVIEFNKDAKRIIVSHSRVFEDEQKMAQREANAERKAEAKAAQKEAAAEAANPAQAVEKATLGDLGELAALKEKLSEN

SEQ ID NO: 143 - protein, 540 aa, Porphyromonas gingivalis
MKTKVLRKFVVAAFAVATLCPLAQAQTMGGDDVKVVQYNQEKLVQTRMSVADNGWIYVMTHSGYDTGNSNVKIFRSKDQGATYQKLRDWDPSDDYQFQDFDIVVTGKNESDIKIWSVELMNKPGGYKSRVAVFSRDANAQNAKLVYKEDFSNVQLYDVDIASNYRSPSSLNNGGNPFALAFAYTGFNNTHKISFVDYVFSLNGGQNFNKNLLFSQDGEKKIDKVDLSLGSTSESMGHNAWPLMGVVFEMNKQGGKSDIGFLSNFVDNDPEFQWSGPIKVSESDMSFSPKIQMLLDEDNNTINGESCHNFMITYSDYDSEYSDWDIRYVYPKKSFKYEKGKTPTMDDLVEAFLTASYQSETNSGLGYDKNANHYLITYAKKEENGTNTLKYRWANYDKIHNKDLWSDTFTYTSSANALYTPQVDINPTKGLVCWSWVEYLPGKRIVWSDTQWTHANGVEDIVMQEGSMKLYPNPAQEYAVISLPTAANCKAVVYDMQGRVVAEASFSGNEYRLNVQHLAKGTYILKVVSDTERFVEKLIVE

SEQ ID NO: 144 - protein, 1158 aa, Porphyromonas gingivalis
MKRILPIVAFLSLFLALALPAKAQRAMGKTADRSLMASGHWVKIRVDASGVYRLTDEQLRANGFSDPSKVGVFGYGGGVLPEDLSRITTDDLPPVPVLRQGNALYFYAVGPVTWFYNPAKTTMEHTVNTYSTHGYYFLSDAAGAPLQMSQYTGGGASAEALIDYYDELMLHEQELYSPKESGRDLYGESFSAVNTRTVKFPLRGNTRSSGELGTVFSYIAKARSAGGGREMSLSANGILIFSDPFSMTSNEVSNSYLAGKKRRLYHSTPMNSLVNELRLDANYSMTGDAVNLDFIEVATQNDLRYDGAPMHIRRFSNLPVLGGESCRFVISEVPESLVVLQANSSLTASLVPVKTVGDKTIEFVAPPKGQDRRTINTFYAVDLSQASAPEILGAVPNQNLHGEEIPDLIIVSTQALLLEADRLATYRREKNGLKVLVVLQEQVFNEFSGGTPDATAYRLFAKMFYDRWKANAPVGETFPMQMLLFGDGAHDNRKVSVAWQKPYLQQTEFLLTFQAVNSTNVNSYVTDDYFGLLDDQPASVNIGWRNYNMAVGRFPVRTPAEARIAVDKTIRYEEDRESGAWRIRACFAADNGDKHATETSRLIDTVKRYAPAIMPVRAFQDVYPHVIENGLHSIPGAKKKMLETLQSGIILLNYAGHGGPAGWSDEHLLTLNDIHKFNYKHMPIWITATCDFANYDSQTTSAGEEVFLHEKSGTPIMFSTTRVVYNTQNEKINGFMLRRMFEKAKDGRYRTMGEIIRSAKQGMLSTVFPDSINQLSFFLMGDPSVRMNLPTHKVQLTAINGQDPEGQYGTIMLKSLERVALKGKVTDEKGTFDETFSGKVFLTVFDGRKKMTALEEEGNDLSLVYYDYPNVMYAGIAEVKDGLFETSFIVPKDVNYSEHEGRINLYAYNESTKAEAMGVDFSIRVQPGIPDEVTEDNTPPEIISCFLNDSTFRSGDEVNPTPLFMAEVFDLNGINITGSGVGHDITLCIDGRADLTYNLNAYFTSSATDAGVGTILFMIPALAEGDHTARLTVWDIFNNAVHHDFSFRVVDGIAPDVADVILFPNPVRESATFRIFHNRPGSDLNVAVEIYDFTGRLVNSLPVKTYSSSYGEPIEIKWDLTSKYGVKIGNGFYLYRCVVNSPGGQTASMAKKMIVVGQ

SEQ ID NO: 145 - protein, 556 aa, Porphyromonas gingivalis
MKKLLQAKALILALGLFQLPAIAQTQMQADRTNGQFATEEMQRAFQETNPPAGPVRAIAEYERSAAVLVRYPFGIPMELIKELAKNDKVITIVASESQKNTVITQYTQSGVNLSNCDFIIAKTDSYWTRDYTGWFAMYDTNKVGLVDFIYNRPRPNDDEFPKYEAQYLGIEMFGMKLKQTGGNYMTDGYGSAVQSHIAYTENSSLSQAQVNQKMKDYLGITHHDVVQDPNGEYINHVDCWGKYLAPNKILIRKVPDNHPQHQALEDMAAYFAAQTCAWGTKYEVYRALATNEQPYTNSLILNNRVFVPVNGPASVDNDALNVYKTAMPGYEIIGVKGASGTPWLGTDALHCRTHEVADKGYLYIKHYPILGEQAGPDYKIEADVVSCANATISPVQCYYRINGSGSFKAADMTMESTGHYTYSFTGLNKNDKVEYYISAADNSGRKETYPFIGEPDPFKFTCMNETNTCTVTGAAKALRAWFNAGRSELAVSVSLNIAGTYRIKLYNTAGEEVAAMTKELVAGTSVFSMDVYSQAPGTYVLVVEGNGIRETMKILK

SEQ ID NO: 146 - protein, 428 aa, Porphyromonas gingivalis
MKLSSKKILAIIALLTMGHAVQAQFVPAPTTGIRMSVTTTKAVGEKIELLVHSIEKKGIWIDLNGDATYQQGEEITVFDEAYHEYTIGTQTLTIYGNTTRLGCRSTGATAVDVTKNPNLTYLACPKNNLKSLDLTQNPKLLRVWCDSNEIESLDLSGNPALIILGCDRNKLTELKTDNNPKLASLWCSDNNLTELELSANPRLNDLWCFGNRITKLDLSANPLLVTLWCSDNELSTLDLSKNSDVAYLWCSSNKLTSLNLSGVKGLSVLVCHSNQIAGEEMTKVVNALPTLSPGAGAQSKFVVVDLKDTDEKNICTVKDVEKAKSKNWRVFDFNGDSDNMLPYEGSPTSNLAVDAPTVRIYPNPVGRYALVEIPESLLGQEAALYDMNGVKVYSFAVESLRQNIDLTHLPDGTYFFRLDNYTTKLIKQ

SEQ ID NO: 147 - protein, 310 aa, Porphyromonas gingivalis
MRKTIIFCLLLALFGCSWAQERVDEKVFSAGTSIFRGILEKVKAPLMYGDREVWGMARASEDFFFILPVTDDLTPVLFYNRLTNEPCFVSDQGITEYFKFAQEGDYIEVEGSSVFMANLLYYRFFPTRITSYNAPIEGVVSKTGNPAFTIPMLPGVSDCIEISNNRKVFLTNQLGVVNITDGMEPPIIAGVSASYGSSVRVYGHVSQRWDIIGHCYLDIYPTNCYPLSTKPVAGDDEVFVKQQGRQIEIDSNSPIVQVVVYDLEGKSVFRKRMTENAYTLSFRAPMLGFMTIMIETQNSIINKKLNVTQL

SEQ ID NO: 148 - protein, 405 aa, Porphyromonas gingivalis
MKKTTIISLIVFGAFFAAVGQTKDNSSYKPFSKEDIAGGVYSLPTQNRAQKDNAEWLLTATVSTNQSADTHFIFDENNRYIARDIKANGVRKSTDSIYYDANGRISHVDLYISFSGGEPALDTRFKYTYDDEGKMTVREVFMLVMDPNTPISRLEYHYDAQGRLTHWISFAFGAESQKNTYHYNEKGLLVSEVLSNAMGTTYSDTGKTEYSYDDADNMVKAEYFVVQQGKAWQVLKREEYTYEDNICIQYLAINGTDTKVYKRDIESDKSISANVIDIPSMPEQTWPNMYGFNAKRLKETYSSYEGDVATPIFDYIYTYKALTSMATPSTEAQVAVYLNPSTDRLVILANGITHLSMYDLQGKLIRDCALSGDKVEMGVGSLTKGTYLLKVNTDQGAFVRKVVIR

SEQ ID NO: 149 - DNA, 25 bp, Porphyromonas gingivalis
gcgccatatgctggccgaaccggcc

SEQ ID NO: 150 - DNA, 31 bp, Porphyromonas gingivalis
gcgcctcgagtcaattcatttccttatagag

SEQ ID NO: 151 - DNA, 26 bp, Porphyromonas gingivalis
cgcggtatacatgaaaagaatgacgc

SEQ ID NO: 152 - DNA, 28 bp, Porphyromonas gingivalis
cgcgagatctgaaagacaactgaatacc

SEQ ID NO: 153 - DNA, 29 bp, Porphyromonas gingivalis
gcgcgtatacatgaagaaatcaagtgtag

SEQ ID NO: 154 - DNA, 30 bp, Porphyromonas gingivalis
gcgcagatctcttcagcgtaccttgctgtg

SEQ ID NO: 155 - DNA, 33 bp, Porphyromonas gingivalis
cttctgtatacttacagcggacatcataaaatc

SEQ ID NO: 156 - DNA, 33 bp, Porphyromonas gingivalis
ttccaggagggtaccacgcaactcttcttcgat

SEQ ID NO: 157 - DNA, 30 bp, Porphyromonas gingivalis
ttgcaacatatgatcagaacgatactttca

SEQ ID NO: 158 - DNA, 30 bp, Porphyromonas gingivalis
agcaatctcgagcggttcatgagccaaagc

SEQ ID NO: 159 - DNA, 34 bp, Porphyromonas gingivalis
taaacatatgtgcctcgaacccataattgctccg

SEQ ID NO: 160 - DNA, 33 bp, Porphyromonas gingivalis
cgtccgcggaagctttgatcggccattgctact

SEQ ID NO: 161 - DNA, 28 bp, Porphyromonas gingivalis
cgcggtatacatggagttcaagattgtg

SEQ ID NO: 162 - DNA, 28 bp, Porphyromonas gingivalis
cgcgagatctgttttctgaaagcttttc

SEQ ID NO: 163 - DNA, 28 bp, Porphyromonas gingivalis
cgcggtatacatggaaaacttaaagaac

SEQ ID NO: 164 - DNA, 28 bp, Porphyromonas gingivalis
cgcgagatctgttttctgaaagcttttc

SEQ ID NO: 165 - DNA, 30 bp, Porphyromonas gingivalis
cgcggatatcatggataaagtgagctatgc

SEQ ID NO: 166 - DNA, 31 bp, Porphyromonas gingivalis
cgcgagatcttttgttgatactcaataattc

SEQ ID NO: 167 - DNA, 41 bp, Porphyromonas gingivalis
gcgcgtatacatgagagcaaacatttggcagatactttccg

SEQ ID NO: 168 - DNA, 31 bp, Porphyromonas gingivalis
gcgcagatctgcgcaagcgcagtatatcgcc

SEQ ID NO: 169 - DNA, 48 bp, Porphyromonas gingivalis
gcgcgtatacatgaatagcagacatctgacaatcacaatcattgccgg

SEQ ID NO: 170 - DNA, 39 bp, Porphyromonas gingivalis
gcgcagatctgctgttctgtgagtgcagttgtttaagtg

SEQ ID NO: 171 - DNA, 34 bp, Porphyromonas gingivalis
gcgccatatgcggacaaaaactatcttttttgcg

SEQ ID NO: 172 - DNA, 37 bp, Porphyromonas gingivalis
gcgcctcgaggttgttgaatcgaatcgctatttgagc

SEQ ID NO: 173 - DNA, 38 bp, Porphyromonas gingivalis
gcgcggcgccatgacggacaacaaacaacgtaatatcg

SEQ ID NO: 174 - DNA, 38 bp, Porphyromonas gingivalis
gcgcctcgagttacttgcgtatgatcacggacataccc

SEQ ID NO: 175 - DNA, 28 bp, Porphyromonas gingivalis
ccccggatccgatgcgactgatcaaggc

SEQ ID NO: 176 - DNA, 28 bp, Porphyromonas gingivalis
ccccctcgagcggaacggggtcatagcc

SEQ ID NO: 177 - DNA, 29 bp, Porphyromonas gingivalis
cgcggtatacatgaattacctgtacatac

SEQ ID NO: 178 - DNA, 30 bp, Porphyromonas gingivalis
cgcgggatccgttcgattggtcgtcgatgg

SEQ ID NO: 179 - DNA, 31 bp, Porphyromonas gingivalis
cgcgcatatggagattgctttcctttcttcg

SEQ ID NO: 180 - DNA, 29 bp, Porphyromonas gingivalis
cgcgctcgagttagttcgattggtcgtcg

SEQ ID NO: 181 - DNA, 34 bp, Porphyromonas gingivalis
gcgcgatatcgctagcatgaaaaagctatttctc

SEQ ID NO: 182 - DNA, 38 bp, Porphyromonas gingivalis
gcgcagatctctcgagtttgccatcggattgcggattg

SEQ ID NO: 183 - DNA, 34 bp, Porphyromonas gingivalis
cgctgaattccagatttcgttcggaggggaaccc

SEQ ID NO: 184 - DNA, 35 bp, Porphyromonas gingivalis
ctatgcggccgcctgcttcacgatcttttggctca

SEQ ID NO: 185 - DNA, 34 bp, Porphyromonas gingivalis
tgctggatcccaagagatctcaggcatgaatgca

SEQ ID NO: 186 - DNA, 37 bp, Porphyromonas gingivalis
gagtgcggccgctcggcctctttatctctaccttttc

SEQ ID NO: 187 - DNA, 33 bp, Porphyromonas gingivalis
gcttgcggccgcccttatgaaagatttgcagat

SEQ ID NO: 188 - DNA, 35 bp, Porphyromonas gingivalis
ggtgctcgagtatactcaacaagcaccttatgcac

SEQ ID NO: 189 - DNA, 34 bp, Porphyromonas gingivalis
ggcgggatccgctcaggagcaactgaatgtggta

SEQ ID NO: 190 - DNA, 37 bp, Porphyromonas gingivalis
gagtgcggccgctgtggaacaaattgcgcaatccatc

SEQ ID NO: 191 - DNA, 34 bp, Porphyromonas gingivalis
agcagaattcggaaacgcacagagcttttgggaa

SEQ ID NO: 192 - DNA, 37 bp, Porphyromonas gingivalis
gagtgcggccgcttacctgcaccttatgactgaatac

SEQ ID NO: 193 - DNA, 34 bp, Porphyromonas gingivalis
tgctgaattccagacgatgggaggagatgatgtc

SEQ ID NO: 194 - DNA, 37 bp, Porphyromonas gingivalis
gagtgcggccgctttccacgatgagcttctctacgaa

SEQ ID NO: 195 - DNA, 34 bp, Porphyromonas gingivalis
ggccgagctccaagaggaaggtatttggaatacc

SEQ ID NO: 196 - DNA, 37 bp, Porphyromonas gingivalis
gagtgcggccgctttgtcctaccacgatcattttctt

SEQ ID NO: 197 - DNA, 34 bp, Porphyromonas gingivalis
tgctgagctccaaacgcaaatgcaagcagaccga

SEQ ID NO: 198 - DNA, 37 bp, Porphyromonas gingivalis
gagtgcggccgcttttgagaattttcattgtctcacg

SEQ ID NO: 199 - DNA, 34 bp, Porphyromonas gingivalis
ggcgggatcccagtttgttccggctcccaccaca

SEQ ID NO: 200 - DNA, 37 bp, Porphyromonas gingivalis
gagtgcggccgctctgtttgatgagcttagtggtata

SEQ ID NO: 201 - DNA, 34 bp, Porphyromonas gingivalis
agcagaattccaagaaagagtcgatgaaaaagta

SEQ ID NO: 202 - DNA, 43 bp, Porphyromonas gingivalis
gagtgcggccgcttagctgtgtaacattaagttttttattgat

SEQ ID NO: 203 - DNA, 34 bp, Porphyromonas gingivalis
tgctgaattcaaggacaattcttcttacaaacct

SEQ ID NO: 204 - DNA, 37 bp, Porphyromonas gingivalis
gagtgcggccgcttcgaatcacgacttttctcacaaa

SEQ ID NO: 205 - DNA, 34 bp, Porphyromonas gingivalis
ggcagaattccagtctttgagcacaatcaaagta

SEQ ID NO: 206 - DNA, 37 bp, Porphyromonas gingivalis
gagtgcggccgctgatagccagcttgatgctcttagc

SEQ ID NO: 207 - DNA, 34 bp, Porphyromonas gingivalis
ggccgaattccagatggatattggtggagacgat

SEQ ID NO: 208 - DNA, 37 bp, Porphyromonas gingivalis
gagtgcggccgctctctacaatgattttttccacgaa

SEQ ID NO: 209 - DNA, 34 bp, Porphyromonas gingivalis
gaacggatccaacgtgtctgctcagtcaccccga

SEQ ID NO: 210 - DNA, 37 bp, Porphyromonas gingivalis
gagtgcggccgcttctgagcgatacttttgcacgtat

SEQ ID NO: 211 - DNA, 28 bp, Porphyromonas gingivalis
gcgcctcgagattcatttccttatagag

SEQ ID NO: 212 - DNA, 33 bp, Porphyromonas gingivalis
cttcttgtcgactacagcggacatcataaaatc

SEQ ID NO: 213 - DNA, 33 bp, Porphyromonas gingivalis
ttccacctcgagttaacgcaactcttcttcgat

SEQ ID NO: 214 - DNA, 34 bp, Porphyromonas gingivalis
taaagaattctgcctcgaacccataattgctccg

SEQ ID NO: 215 - DNA, 27 bp, Porphyromonas gingivalis
cgcgcatatggataaagtgagctatgc

SEQ ID NO: 216 - DNA, 31 bp, Porphyromonas gingivalis
cgcgctcgagtttgttgatactcaataattc

SEQ ID NO: 217 - DNA, 37 bp, Porphyromonas gingivalis
gcccggcgccatgcggacaaaaactatcttttttgcg

SEQ ID NO: 218 - DNA, 40 bp, Porphyromonas gingivalis
gcccggcgccttagttgttgaatcgaatcgctatttgagc

SEQ ID NO: 219 - DNA, 1257 bp, Porphyromonas gingivalis
agcggtcaggccgagattgttcttgaagctcacgatgtttggaatgatggatccggttatcagattcttttggatgcagaccatgatcaatatggacaggttatacccagtgatacccatactctttggccgaactgtagtgtcccggccaatctgttcgctccgttcgaatatacggttccggaaaatgcagatccttcttgttcccctaccaatatgataatggatggtactgcatccgttaatataccggccggaacttatgactttgcaattgctgctcctcaagcaaatgcaaagatttggattgccggacaaggaccgacgaaagaagatgattatgtatttgaagccggtaaaaaataccatttccttatgaagaagatgggtagcggtgatggaactgaattgactataagcgaaggtggtggaagcgattacacctatactgtctatcgtgacggcacgaagatcaaggaaggtctgacggctacgacattcgaagaagacggtgtagctgcaggcaatcatgagtattgcgtggaagttaagtacacagccggcgtatctccgaaggtatgtaaagacgttacggtagaaggatccaatgaatttgctcctgtacagaacctgaccggtagtgcagtcggccagaaagtaacgcttaagtgggatgcacctaatggtaccccgaatccaaatccaaatccgaatccaaatccgaatcccggaacaactacactttccgaatcattcgaaaatggtattcctgcctcatggaagacgatcgatgcagacggtgacgggcatggctggaagcctggaaatgctcccggaatcgctggctacaatagcaatggttgtgtatattcagagtcattcggtcttggtggtataggagttcttacccctgacaactatctgataacaccggcattggatttgcctaacggaggtaagttgactttctgggtatgcgcacaggatgctaattatgcatccgagcactatgcggtgtatgcatcttcgaccggtaacgatgcatccaacttcacgaatgctttgttggaagagacgattacggcaaaaggtgttcgctcgccggaagctattcgtggtcgtatacagggtacttggcgccagaagacggtagaccttcccgcaggtacgaaatatgttgctttccgtcacttccaaagcacggatatgttctacatcgaccttgatgaggttgagatcaaggccaatggcaagcgc

SEQ ID NO: 220 - DNA, 588 bp, Porphyromonas gingivalis
aaggtatgtaaagacgttacggtagaaggatccaatgaatttgctcctgtacagaacctgaccggtagtgcagtcggccagaaagtaacgcttaagtgggatgcacctaatggtaccccgaatccaaatccaaatccgaatccaaatccgaatcccggaacaactacactttccgaatcattcgaaaatggtattcctgcctcatggaagacgatcgatgcagacggtgacgggcatggctggaagcctggaaatgctcccggaatcgctggctacaatagcaatggttgtgtatatctcgacaatagtgcaaagattgatcgtaatcaagaaatcaatgtttacaatacagctgaatatgcgaagaccaacaacgcaccgatcaaggtagtaggttacgctgacgaaaaaaccggtactgcggcctataacatgaagctttcagagcgtcgtgcaaaagcggtagccaagatgcttgaaaagtatggtgtttctgcggatcgcattacaattgaatggaagggctcatcagagcaaatctatgaagagaacgcttggaatcgtattgtagtaatgactgcagcggaa

SEQ ID NO: 221 - protein, 419 aa, Porphyromonas gingivalis
SGQAEIVLEAHDVWNDGSGYQILLDADHDQYGQVIPSDTHTLWPNCSVPANLFAPFEYTVPENADPSCSPTNMIMDGTASVNIPAGTYDFAIAAPQANAKIWIAGQGPTKEDDYVFEAGKKYHFLMKKMGSGDGTELTISEGGGSDYTYTVYRDGTKIKEGLTATTFEEDGVAAGNHEYCVEVKYTAGVSPKVCKDVTVEGSNEFAPVQNLTGSAVGQKVTLKWDAPNGTPNPNPNPNPNPNPGTTTLSESFENGIPASWKTIDADGDGHGWKPGNAPGIAGYNSNGCVYSESFGLGGIGVLTPDNYLITPALDLPNGGKLTFWVCAQDANYASEHYAVYASSTGNDASNFTNALLEETITAKGVRSPEAIRGRIQGTWRQKTVDLPAGTKYVAFRHFQSTDMFYIDLDEVEIKANGKR

SEQ ID NO: 222 - protein, 196 aa, Porphyromonas gingivalis
KVCKDVTVEGSNEFAPVQNLTGSAVGQKVTLKWDAPNGTPNPNPNPNPNPNPGTTTLSESFENGIPASWKTIDADGDGHGWKPGNAPGIAGYNSNGCVYLDNSAKIDRNQEINVYNTAEYAKTNNAPIKVVGYADEKTGTAAYNMKLSERRAKAVAKMLEKYGVSADRITIEWKGSSEQIYEENAWNRIVVMTAAE

SEQ ID NO: 223 - protein, 419 aa, Porphyromonas gingivalis
ANEAKVVLAADNVWGDNTGYQFLLDADHNTFGSVIPATGPLFTGTASSNLYSANFEYLIPANADPVVTTQNIIVTGQGEVVIPGGVYDYCITNPEPASGKMWIAGDGGNQPARYDDFTFEAGKKYTFTMRRAGMGDGTDMEVEDDSPASYTYTVYRDGTKIKEGLTATTFEEDGVAAGNHEYCVEVKYTAGVSPKVCKDVTVEGSNEFAPVQNLTGSSVGQKVTLKWDAPNGTPNPNPNPNPNPGTTLSESFENGIPASWKTIDADGDGHGWKPGNAPGIAGYNSNGCVYSESFGLGGIGVLTPDNYLITPALDLPNGGKLTFWVCAQDANYASEHYAVYASSTGNDASNFTNALLEETITAKGVRSPKAIRGRIQGTWRQKTVDLPAGTKYVAFRHFQSTDMFYIDLDEVEIKANGKR

SEQ ID NO: 224 - protein, 231 aa, Porphyromonas gingivalis
FLLDADHNTFGSVIPATGPLFTGTASSNLYSANFEYLIPANADPVVTTQNIIVTGQGEVVIPGGVYDYCITNPEPASGKMWIAGDGGNQPARYDDFTFEAGKKYTFTMRRAGMGDGTDMEVEDDSPASYTYTVYRDGTKIKEGLTATTFEEDGVAAGNHEYCVEVKYTAGVSPKVCKDVTVEGSNEFAPVQNLTGSSVGQKVTLKWDAPNGTPNPNPNPNPNPGTTLSESF

SEQ ID NO: 225 - DNA, 1257 bp, Porphyromonas gingivalis
gccaacgaagccaaggttgtgcttgcggcagacaacgtatggggagacaatacgggttaccagttcttgttggatgccgatcacaatacattcggaagtgtcattccggcaaccggtcctctctttaccggaacagcttcttccaatctttacagtgcgaacttcgagtatttgatcccggccaatgccgatcctgttgttactacacagaatattatcgttacaggacagggtgaagttgtaatccccggtggtgtttacgactattgcattacgaacccggaacctgcatccggaaagatgtggatcgcaggagatggaggcaaccagcctgcacgttatgacgatttcacattcgaagcaggcaagaagtacaccttcacgatgcgtcgcgccggaatgggagatggaactgatatggaagtcgaagacgattcacctgcaagctatacctacacggtgtatcgtgacggcacgaagatcaaggaaggtctgacagctacgacattcgaagaagacggtgtagctgcaggcaatcatgagtattgcgtggaagttaagtacacagccggcgtatctccgaaggtatgtaaagacgttacggtagaaggatccaatgaatttgctcctgtacagaacctgaccggtagttcagtaggtcagaaagtaacgcttaagtgggatgcacctaatggtaccccgaatccgaatccaaatccgaatccgaatccgggaacaacactttccgaatcattcgaaaatggtattccggcatcttggaagacgatcgatgcagacggtgacgggcatggctggaaacctggaaatgctcccggaatcgctggctacaatagcaatggttgtgtatattcagagtcattcggtcttggtggtataggagttcttacccctgacaactatctgataacaccggcattggatttgcctaacggaggtaagttgactttctgggtatgcgcacaggatgctaattatgcatccgagcactatgcggtgtatgcatcttcgaccggtaacgatgcatccaacttcacgaatgctttgttggaagagacgattacggcaaaaggtgttcgctcgccgaaagctattcgtggtcgtatacagggtacttggcgccagaagacggtagaccttcccgcaggtacgaaatatgttgctttccgtcacttccaaagcacggatatgttctacatcgaccttgatgaggttgagatcaaggccaatggcaagcgc

SEQ ID NO: 226 - DNA, 693 bp, Porphyromonas gingivalis
ttcttgttggatgccgatcacaatacattcggaagtgtcattccggcaaccggtcctctctttaccggaacagcttcttccaatctttacagtgcgaacttcgagtatttgatcccggccaatgccgatcctgttgttactacacagaatattatcgttacaggacagggtgaagttgtaatccccggtggtgtttacgactattgcattacgaacccggaacctgcatccggaaagatgtggatcgcaggagatggaggcaaccagcctgcacgttatgacgatttcacattcgaagcaggcaagaagtacaccttcacgatgcgtcgcgccggaatgggagatggaactgatatggaagtcgaagacgattcacctgcaagctatacctacacggtgtatcgtgacggcacgaagatcaaggaaggtctgacagctacgacattcgaagaagacggtgtagctgcaggcaatcatgagtattgcgtggaagttaagtacacagccggcgtatctccgaaggtatgtaaagacgttacggtagaaggatccaatgaatttgctcctgtacagaacctgaccggtagttcagtaggtcagaaagtaacgcttaagtgggatgcacctaatggtaccccgaatccgaatccaaatccgaatccgaatccgggaacaacactttccgaatcattc

SEQ ID NO: 227 - protein, 1706 aa, Unknown
  Sequence is from an organism putatively related to Porphyromonas gingivalis
MKNLNKFVSIALCSSLLGGMAFAQQTELGRNPNVRLLESTQQSVTKVQFRMDNLKFTEVQTPKGIGQVPTYTEGVNLSEKGMPTLPILSRSLAVSDTREMKVEVVSSKFIEKKNVLIAPSKGMIMRNEDPKKIPYVYGKTYSQNKFFPGEIATLDDPFILRDVRGQVVNFAPLQYNPVTKTLRIYTEITVAVSETSEQGKNILNKKGTFAGFEDTYKRMFMNYEPGRYTPVEEKQNGRMIVIVAKKYEGDIKDFVDWKNQRGLRTEVKVAEDIASPVTANAIQQFVKQEYEKEGNDLTYVLLIGDHKDIPAKITPGIKSDQVYGQIVGNDHYNEVFIGRFSCESKEDLKTQIDRTIHYERNITTEDKWLGQALCIASAEGGPSADNGESDIQHENVIANLLTQYGYTKIIKCYDPGVTPKNIIDAFNGGISLANYTGHGSETAWGTSHFGTTHVKQLTNSNQLPFIFDVACVNGDFLFSMPCFAEALMRAQKDGKPTGTVAIIASTINQSWASPMRGQDEMNEILCEKHPNNIKRTFGGVTMNGMFAMVEKYKKDGEKMLDTWTVFGDPSLLVRTLVPTKMQVTAPAQINLTDASVNVSCDYNGAIATISANGKMFGSAVVENGTATINLTGLTNESTLTLTVVGYNKETVIKTINTNGEPNPYQPVSNLTATTQGQKVTLKWDAPSTKTNATTNTARSVDGIRELVLLSVSDAPELLRSGQAEIVLEAHDVWNDGSGYQILLDADHDQYGQVIPSDTHTLWPNCSVPANLFAPFEYTVPENADPSCSPTNMIMDGTASVNIPAGTYDFAIAAPQANAKIWIAGQGPTKEDDYVFEAGKKYHFLMKKMGSGDGTELTISEGGGSDYTYTVYRDGTKIKEGLTATTFEEDGVATGNHEYCVEVKYTAGVSPKVCKDVTVEGSNEFAPVQNLTGSAVGQKVTLKWDAPNGTPNPNPNPNPNPNPGTTTLSESFENGIPASWKTIDADGDGHGWKPGNAPGIAGYNSNGCVYSESFGLGGIGVLTPDNYLITPALDLPNGGKLTFWVCAQDANYASEHYAVYASSTGNDASNFTNALLEETITAKGVRSPEAMRGRIQGTWRQKTVDLPAGTKYVAFRHFQSTDMFYIDLDEVEIKANGKRADFTETFESSTHGEAPAEWTTIDADGDGQGWLCLSSGQLDWLTAHGGTNVVSSFSWNGMALNPDNYLISKDVTGATKVKYYYAVNDGFPGDHYAVMISKTGTNAGDFTVVFEETPNGINKGGARFGLSTEADGAKPQSVWIERTVDLPAGTKYVAFRHYNCSDLNYILLDDIQFTMGGSPTPTDYTYTVYRDGTKIKEGLTETTFEEDGVATGNHEYCVEVKYTAGVSPKKCVNVTVNSTQFNPVKNLKAQPDGGDVVLKWEAPSAKKTEGSREVKRIGDGLFVTIEPANDVRANEAKVVLAADNVWGDNTGYQFLLDADHNTFGSVIPATGPLFTGTASSDLYSANFESLIPANADPVVTTQNIIVTGQGEVVIPGGVYDYCITNPEPASGKMWIAGDGGNQPARYDDFTFEAGKKYTFTMRRAGMGDGTDMEVEDDSPASYTYTVYRDGTKIKEGLTETTYRDAGMSAQSHEYCVEVKYTAGVSPKVCVDYIPDGVADVTAQKPYTLTVVGKTITVTCQGEAMIYDMNGRRLAAGRNTVVYTAQGGYYAVMVVVDGKSYVEKLAIK

SEQ ID NO: 228 - protein, 736 aa, Unknown
  Sequence is from an organism putatively related to Porphyromonas gingivalis
MKKNFSRIVSIVAFSSLLGGMAFAQPAERGRNPQVRLLSAEQSMSKVQFRMDNLQFTDVQTSKGVAQVPTFTEGVNISEKGTPILPILSRSLAVSETRAMKVEVVSSKFIEKKDVLIAPSKGVISRAENPDQIPYVYGQSYNEDKFFPGENATLSDPFILRDVRGQVVNFAPLQYNPVTKTLRIYTEIVVAVSETAEAGQNTISLVKNSTFTGFEDIYKSVFMNYEATRYTPVEEKENGRMIVIVAKKYEGDIKDFVDWKNQRGLRTEVKVAEDIASPVTANAIQQFVKQEYEKEGNDLTYVLLVGDHKDIPAKITPGIKSDQVYGQIVGNDHYNEVFIGRFSCESKEDLKTQIDRTIHYERNITTEDKWLGQALCIASAEGGPSADNGESDIQHENVIANLLTQYGYTKIIKCYDPGVTPKNIIDAFNGGISLVNYTGHGSETAWGTSHFGTTHVKQLTNSNQLPFIFDVACVNGDFLFSMPCFAEALMRAQKDGKPTGTVAIIASTIDQYWAPPMRGQDEMNEILCEKHPNNIKRTFGGVTMNGMFAMVEKYKKDGENMLDTWTVFGDPSLLVRTLVPTEMQVTAPANISASAQTFEVACDYNGAIATLSDDGDMVGTAIVKDGKAIIKLNESIADETNLTLTVVGYNKVTVIKDVKVEGTSIADVANDKPYTVAVSGKTITVESPAAGLTIFDMNGRRVATAKNRMVFEAQNGVYAVRIATEGKTYTEKVIVK

SEQ ID NO: 229 - protein, 1302 aa, Unknown
  Sequence is from an organism putatively related to Porphyromonas gingivalis
MGFRPLKLQYFTVFGFILAYIICRGSKIYKDKNNIKGEVMKKISFILLLVFTTAILVAASGTIKLQDNPAKVQLLEKSDTGLSIAYAVDELQFREINTKEGIFTELNALNYTTTNVTGLPALPLMRQLISVPLGANVTANIVSSSAKVINLDEQGVLYPLMPRQESVSKSADLEQLPFEVNRDFYNANMWTDNPSITVTEIGMMRGTRIFAVDFVPIKYNPVLKKIEVIYQAEVKVAFSGANFIATNELQAKTYSPAFEGVFAQTLINYNAPKVSFLRYPIGYVIILPDNFIAPMQPFIDWKKQEGYNVIVAPTSITGTTTTSIKAYMQNLWNSATSENPAPSYLLIVGDVAQVPTNNGNAGSHPTDLTYVRLQGTDYMPEMYFGRFSATSVAEVTNQVNKTLMYEQYTMPSDAYLSEVVMIAGVDSYYSTTHANGQINYGTNNYFNPAHNITSHTYLYPASGSSASAIVQNASNGMGYINYTAHGDVTEWYNPNFSISNINSLQNTNKYSYVVGNCCLTSKFDNPICFAEAWLRATNKGAIIYIGGTNSTYWDEDYWWGVGYKPPVVGTGSPFVAGRTGAYDALFHDHNEPFADWAGNAGSNVVMGNMAVVQSNSSRINYYWEIYSIMGDPSLVPYLGIPAQNAYTPPAQMFLGFNSMDIQTDPYSYVALSMNNELHGVGLADASGNLTLNYTPFTEPGIAKLVITRSLRKPLIANIEIIPNEGPYVTVGPLELNDGNNNIAEAGDNINISLQFNNVGIETASNLTATLTCDSPYILLNNATIQLPDIASGNSINQTNAFQINILPDVPDQHLAGFNITVSDGEDTWVTQRSLTINAPNVVFGNHTLFDSNSDGIYQPGETVTISLSISNTGHMNVDGGSLAIVLSSPYAALDNYNFIIPPLTAGNGIPIVLHLFISQDCPNEEVIPIGFAMNAGIQLLNHSIMIPVGIIGESFESGDFTAFPWVNNSTIPWTIISGTSNAHFGNYAAKSGAIGNNGSTTLQITMEVPSAGNISFWRKVSSEANYDWLKFYIDNNETGSWSGEIGWSEVSYPVTAGSHIFKWTYSKDVGSVSGSDCAWLDDIRFPGMGVLETAIFYTTTTQIDFTDVLPNTTVSVDFALRNLGNIAMQGIITCPPNFELSQYGNALPANYTYQIEAGQTVIYTLSYIAGNSVSELQTNMQITTNDPHHPMVIIPVNLTPLANDDNVNIPYVTALHKNYPNPFNPETTIHYSLSEAGPVKIEVYNIKGQLVRNLVNERKTAGNYTVIWNGKDEQGKNVSSGIYFYRMQTKNYSSTQKMMLMK

SEQ ID NO: 230 - protein, 1128 aa, Unknown
  Sequence is from an organism putatively related to Porphyromonas gingivalis
MAILPAIFLLLSFSLSAELIAEGNSKNSVSLLIDNENETILEYRISAFEKNMVTIEGEEWYQIRLPKEGITQDKGYPELPVFNRSIIIPDQALMAIEVFDLEFKDYPIKVAPSKGVITRDINPATIPYTFGNVYQENSFYPQKMVALSEPYILRDFRGITVLTTPFAYNPVTGTLRVYTSYKVKVYNQGNDTVNSFNRSRTSVSRSFCPLYENHFLNWNSYRYTPVDDSYGKLLVICHSSFLTQIAPYINWKRQKGIDTELVEFSTIGTTANQLKAYIQNRYNADNSITFVQLVGDAPQIPTLSYSGGGSDPSFSLVAGSDNYPDIFIGRFSAQTTAEVTAQVNKTIQYERDLNTSATWLSKAMGIASAEGTSGEGDNGESDITHMNLIRTKLLNYGYTSVDQIYDPGASASTVTTNVNAGRGFINYVGHGSNTSWGTTGFSNTNASALTNGNKVPFIMDVACVNGNFVSYTCFAEAWMRNANGGAVGIYASSINQSWASPMRAQDEVTDLLTGEVHTTLGGLYYNGSCKMMDVYGSDGVNMFKTWHIFGDASLQVRSKTPLAMTVSHPASVTSGTNNIIISSGVANALVAITYNNTIYGKAVTNSSGSAIVNISNPPSGEITYTVTVTAFNRVTYTGSLQQVNVPPDQPRFVAEWEPAQGSIIRYPFGLPYSLIADLSNNCLLYVVVSSSLQATCNSALVSNGVNMANVRYIVTDNDTYWIRDYGPWTIMNRENNLQLIDFTYNRPRPYDDAVPLAIANFLGVDLYKMNITHTGGNIMTDGQGKAMSTDLVLTENTSLSQNDINTMFNNYLGVTDYQLYPDPNNTYINHIDCWAKLLGVDKVIIRSVPTNHSQYSAIEAVVTQWETKLSSYGTPYKIYRVYTPNDEPYTNSFILNKHIYVPLMGTANDASAILAYQNAMPGYIVTGYLYSNFESTDAIHCRVNTIFDDKMISLKHIPPVLSSVSQSLTLSANITHTNALNPSATYISWKIGKNGIWQSSNLTLQSDGNWVTNLTAPVIGDTLFYCFSVTDVTNRNVTLPLCAEYDPFMLIGTYVPAISQPQVQLQVQDTNVRISWNAIPYANNYVIYSANSPDEVFLPVGSTSATFWETPLNTEKKFFKVVAQRVVR

SEQ ID NO: 231 - protein, 1706 aa, Unknown
  Sequence is from an organism putatively related to Porphyromonas gingivalis
MKNLNKFVSIALCSSLLGGMAFAQQTELGRNPNVRLLESTQQSVTKVQFRMDNLKFTEVQTPKGMAQVPTYTEGVNLSEKGMPTLPILSRSLAVSDTREMKVEVVSSKFIEKKNVLIAPSKGMIMRNEDPKKIPYVYGKSYSQNKFFPGEIATLDDPFILRDVRGQVVNFAPLQYNPVTKTLRIYTEITVAVSETSEQGKNILNKKGTFAGFEDTYKRMFMNYEPGRYTPVEEKQNGRMIVIVAKKYEGDIKDFVDWKNQRGLRTEVKVAEDIASPVTANAIQQFVKQEYEKEGNDLTYVLLIGDHKDIPAKITPGIKSDQVYGQIVGNDHYNEVFIGRFSCESKEDLKTQIDRTIHYERNITTEDKWLGQALCIASAEGGPSADNGESDIQHENVIANLLTQYGYTKIIKCYDPGVTPKNIIDAFNGGISLANYTGHGSETAWGTSHFGTTHVKQLTNSNQLPFIFDVACVNGDFLFSMPCFAEALMRAQKDGKPTGTVAIIASTINQSWASPMRGQDEMNEILCEKHPNNIKRTFGGVTMNGMFAMVEKYKKDGEKMLDTWTVFGDPSLLVRTLVPTKMQVTAPAQINLTDASVNVSCDYNGAIATISANGKMFGSAVVENGTATINLTGLTNESTLTLTVVGYNKETVIKTINTNGEPNPYQPVSNLTATTQGQKVTLKWDAPSTKTNATTNTARSVDGIRELVLLSVSDAPELLRSGQAEIVLEAHDVWNDGSGYQILLDADHDQYGQVIPSDTHTLWPNCSVPANLFAPFEYTVPENADPSCSPTNMIMDGTASVNIPAGTYDFAIAAPQANAKIWIAGQGPTKEDDYVFEAGKKYHFLMKKMGSGDGTELTISEGGGSDYTYTVYRDGTKIKEGLTATTFEEDGVAAGNHEYCVEVKYTAGVSPKVCKDVTVEGSNEFAPVQNLTGSAVGQKVTLKWDAPNGTPNPNPNPNPNPNPGTTTLSESFENGIPASWKTIDADGDGHGWKPGNAPGIAGYNSNGCVYSESFGLGGIGVLTPDNYLITPALDLPNGGKLTFWVCAQDANYASEHYAVYASSTGNDASNFTNALLEETITAKGVRSPEAIRGRIQSTWRQKTVDLPAGTKYVAFRHFQSTDMFYIDLDEVEIKANGKRADFTETFESSTHGEATAEWTTIDADGDGQGWLCLSSGQLDWLTAHGGTNVVSSFSWNGMALNPDNYLISKDVTGATKVKYYYAVNDGFPGDHYAVMISKTGTNAGDFTVVFEETPNGINKGGARFGLSTEADGAKPQSVWIERTVDLPAGTKYVAFRHYNCSDLNYILLDDIQFTMGGSPTPTDYTYTVYRDGTKIKEGLTETTFEEDGVATGNHEYCVEVKYTAGVSPKKCVNVTVNSTQFNPVKNLKAQPDGGDVVLKWEAPSAKKTEGSREVKRIGDGLFVTIEPANDVRANEAKVVLAADNVWGDNTGYQFLLDADHNTFGSVIPATGPLFTGTASSDLYSANFEYLIPANADPVVTTQNIIVTGQGEVVIPGGVYDYCITNPEPASGKMWIAGDGGNQPARYDDFTFEAGKKYTFTMRRAGMGDGTDMEVEDDSPASYTYTVYRDGTKIKEGLTETTYRDAGMSAQSHEYCVEVKYTAGVSPKVCVDYIPDGVADVTAQKPYTLTVVGKTITVTCQGEAMIYDMNGRRLAAGRNTVVYTAQGGYYAVMVVVDGKSYVKKLAIK

SEQ ID NO: 232 - protein, 1703 aa, Unknown
  Sequence is from an organism putatively related to Porphyromonas gingivalis
MNKFVSIALCSSLLGGMAFAQQTELGRNPNVRLLESTQQSVTKVQFRMDNLKFTEVQTPKGMAQVPTYTEGVNLSEKGMPTLPILSRSLAVSDTREMKVEVVSSKFIEKKNVLIAPSKGMIMRNEDPKKIPYVYGKSYSQNKFFPGEIATLDDPFILRDVRGQVVNFAPLQYNPVTKTLRIYTEITVAVSETSEQGKNILNKKGTFAGFEDTYKRMFMNYEPGRYTPVEEKQNGRMIVIVAKKYEGDIKDFVDWKNQRGLRTEVKVAEDIASPVTANAIQQFVKQEYEKEGNDLTYVLLVGDHKDIPAKITPGIKSDQVYGQIVGNDHYNEVFIGRFSCESKEDLKTQIDRTIHYERNITTEDKWLGQALCIASAEGGPSADNGESDIQHENVIANLLTQYGYTKIIKCYDPGVTPKNIIDAFNGGISLVNYTGHGSETAWGTSHFGTTHVKQLTNSNQLPFIFDVACVNGDFLFSMPCFAEALMRAQKDGKPTGTVAIIASTINQSWASPMRGQDEMNEILCEKHPNNIKRTFGGVTMNGMFAMVEKYKKDGEKMLDTWTVFGDPSLLVRTLVPTKMQVTAPAQINLTDASVNVSCDYNGAIATISANGKMFGSAVVENGTATINLTGLTNESTLTLTVVGYNKETVIKTINTNGEPNPYQPVSNLTATTQGQKVTLKWDAPSTKTNATTNTARSVDGIRELVLLSVSDAPELLRSGQAEIVLEAHDVWNDGSGYQILLDADHDQYGQVIPSDTHTLWPNCSVPANLFAPFEYTVPENADPSCSPTNMIMDGTASVNIPAGTYDFAIAAPQANAKIWIAGQGPTKEDDYVFEAGKKYHFLMKKMGSGDGTELTISEGGGSDYTYTVYRDGTKIKEGLTATTFEEDGVATGNHEYCVEVKYTAGVSPKVCKDVTVEGSNEFAPVQNLTGSAVGQKVTLKWDAPNGTPNPNPNPNPNPNPGTTTLSESFENGIPASWKTIDADGDGHGWKPGNAPGIAGYNSNGCVYSESFGLGGIGVLTPDNYLITPALDLPNGGKLTFWVCAQDANYASEHYAVYASSTGNDASNFTNALLEETITAKGVRSPEAIRGRIQGTWRQKTVDLPAGTKYVAFRHFQSTDMFYIDLDEVEIKANGKRADFTETFESSTHGEAPAEWTTIDADGDGQGWLCLSSGQLDWLTAHGGTNVVASFSWNGMALNPDNYLISKDVTGATKVKYYYAVNDGFPGDHYAVMISKTGTNAGDFTVVFEETPNGINKGGARFGLSTEANGAKPQSVWIERTVDLPAGTKYVAFRHYNCSDLNYILLDDIQFTMGGSPTPTDYTYTVYRDGTKIKEGLTETTFEEDGVATGNHEYCVEVKYTAGVSPKECVNVTINPTQFNPVKNLKAQPDGGDVVLKWEAPSAKKTEGSREVKRIGDGLFVTIEPANDVRANEAKVVLAADNVWGDNTGYQFLLDADHNTFGSVIPATGPLFTGTASSNLYSANFEYLIPANADPVVTTQNIIVTGQGEVVIPGGVYDYCITNPEPASGKMWIAGDGGNQPARYDDFTFEAGKKYTFTMRRAGMGDGTDMEVEDDSPASYTYTVYRDGTKIKEGLTETTYRDAGMSAQSHEYCVEVKYAAGVSPKVCVDYIPDGVADVTAQKPYTLTVVGKTITVTCQGEAMIYDMNGRRLAAGRNTVVYTAQGGYYAVMVVVDGKSYVEKLAVK

SEQ ID NO: 233 - protein, 1358 aa, Unknown
  Sequence is from an organism putatively related to Porphyromonas gingivalis
MYEKATMPDKSYLEKALLIAGADSYWNPKIGQQTIKYAVQYYYNQDHGYTDVYSYPKAPYTGCYSHLNTGVGFANYTAHGSETSWADPSLTATQVKALTNKDKYFLAIGNCCVTAQFDYPQPCFGEVMTRVKEKGAYAYIGSSPNSYWGEDYYWSVGANAVFGVQPTFEGTSMGSYDATFLEDSYNTVNSIMWAGNLAATHAGNIGNITHIGAHYYWEAYHVLGDGSVMPYRAMPKTNTYTLPASLPQNQASYSIQASAGSYVAISKDGVLYGTGVANASGVATVNMTKQITENGNYDVVITRSNYLPVIKQIQAGEPSPYQPVSNLTATTQGQKVTLKWDAPSAKKAEASREVKRIGDGLFVTIEPANDVRANEAKVVLAADNVWGDNTGYQFLLDADHNTFGSVIPATGPLFTGTASSNLYSANFEYLIPANADPVVTTQNIIVTGQGEVVIPGGVYDYCITNPEPASGKMWIAGDGDNQPARYDDFTFEAGKKYTFTMRRAGMGDGTDMEVEDDSPASYTYTVYRDGTKIKEGLTATTFEEDGVAAGNHEYCVEVKYTAGVSPKVCKDVTVEGSNEFAPVQNLTGSAVGQKVTLKWDAPNGTPNPNPNPNPGTTTLSESFENGIPASWKTIDADGDGHGWKPGNAPGIAGYNSNGCVYSESFGLGGIGVLTPDNYLITPALDLANGGKLTFWVCAQDANYASEHYAVYASSTGNDASNFTNALLEETITAKGVRSPEAIRGRIQGTWRQKTVDLPAGTKYVAFRHFQSTDMFYIDLDEVEIKANGKRADFTETFESSTHGEAPAEWTTIDADGDGQDWLCLSSGQLDWLTAHGGTNVVASFSWNGMALNPDNYLISKDVTGATKVKYYYAVNDGFPGDHYAVMISKTGTNAGDFTVVFEETPNGINKGGARFGLSTEANGAKPQSVWIERTVDLPAGTKYVAFRHYNCSDLNYILLDDIQFTMGGSPTPTDYTYTVYRDGTKIKEGLTETTFEEDGVATGNHEYCVEVKYTAGVSPKVCVNVTINPTQFNPVKNLKAQPDGGDVVLKWEAPSGKRGELLNEDFEGDAIPTGWTALDADGDGNNWDITLNEFTRGERHVLSPLRASNVAISYSSLLQGQEYLPLTPNNFLITPKVEGAKKITYKVGSPGLPQWSHDHYALCISKSGTAAADFEVIFEETMTYTQGGANLTREKDLPAGTKYVAFRHYNCTDVLGIMIDDVVITGEGEGPSYTYTVYRDGTKIQEGLTETTYRDAGMSAQSHEYCVEVKYAAGVSPKVCVDYIPDGVADVTAQKPYTLTVVGKTITVTCQGEAMIYDMNGRRLAAGRNTVVYTAQGGYYAVMVVVDGKSYVEKLAIK

SEQ ID NO: 234 - protein, 1732 aa, Unknown
  Sequence is from an organism putatively related to Porphyromonas gingivalis
MRKLLLLIAASLLGVGLYAQSAKIKLDAPTTRTTCTNNSFKQFDASFSFNEVELTKVETKGGTFASVSIPGAFPTGEVGSPEVPAVRKLIAVPVGATPVVRVKSFTEQVYSLNQYGSEKLMPHQPSMSKSDDPEKVPFVYNAAAYARKGFVGQELTQVEMLGTMRGVRIAALTINPVQYDVVANQLKVRNNIEIEVSFQGADEVATQRLYDASFSPYFETAYKQLFNRDVYTDHGDLYNTPVRMLVVAGAKFKEALKPWLTWKAQKGFYLDVHYTDEAEVGTTNASIKAFIHKKYNDGLAASAAPVFLALVGDTDVISGEKGKKTKKVTDLYYSAVDGDYFPEMYTFRMSASSPEELTNIIDKVLMYEKATMPDKSYLEKVLLIAGADYSWNSQVGQPTIKYGMQYYYNQEHGYTDVYNYLKAPYTGCYSHLNTGVSFANYTAHGSETAWADPLLTTSQLKALTNKDKYFLAIGNCCITAQFDYVQPCFGEVITRVKEKGAYAYIGSSPNSYWGEDYYWSVGANAVFGVQPTFEGTSMGSYDATFLEDSYNTVNSIMWAGNLAATHAGNIGNITHIGAHYYWEAYHVLGDGSVMPYRAMPKTNTYTLPASLPQNQASYSIQASAGSYVAISKDGVLYGTGVANASGVATVSMTKQITENGNYDVVITRSNYLPVIKQIQVGEPSPYQPVSNLTATTQGQKVTLKWEAPSAKKAEGSREVKRIGDGLFVTIEPANDVRANEAKVVLAADNVWGDNTGYQFLLDADHNTFGSVIPATGPLFTGTASSNLYSANFEYLIPANADPVVTTQNIIVTGQGEVVIPGGVYDYCITNPEPASGKMWIAGDGGNQPARYDDFTFEAGKKYTFTMRRAGMGDGTDMEVEDDSPASYTYTVYRDGTKIKEGLTATTFEEDGVAAGNHEYCVEVKYTAGVSPKVCKDVTVEGSNEFAPVQNLTGSSVGQKVTLKWDAPNGTPNPNPNPNPNPGTTLSESFENGIPASWKTIDADGDGHGWKPGNAPGIAGYNSNGCVYSESFGLGGIGVLTPDNYLITPALDLPNGGKLTFWVCAQDANYASEHYAVYASSTGNDASNFTNALLEETITAKGVRSPKAIRGRIQGTWRQKTVDLPAGTKYVAFRHFQSTDMFYIDLDEVEIKANGKRADFTETFESSTHGEAPAEWTTIDADGDGQGWLCLSSGQLDWLTAHGGSNVVSSFSWNGMALNPDNYLISKDVTGATKVKYYYAVNDGFPGDHYAVMISKTGTNAGDFTVVFEETPNGINKGGARFGLSTEANGAKPQSVWIERTVDLPAGTKYVAFRHYNCSDLNYILLDDIQFTMGGSPTPTDYTYTVYRDGTKIKEGLTETTFEEDGVATGNHEYCVEVKYTAGVSPKKCVNVTVNSTQFNPVQNLTAEQAPNSMDAILKWNAPASKRAEVLNEDFENGIPASWKTIDADGDGNNWTTTPPPGGSSFAGHNSAICVSSASYINFEGPQNPDNYLVTPELSLPGGGTLTFWVCAQDANYASEHYAVYASSTGNDASNFANALLEEVLTAKTVVTAPEAIRGTRAQGTWYQKTVQLPAGTKYVAFRHFGCTDFFWINLDDVVITSGNAPSYTYTIYRNNTQIASGVTETTYRDPDLATGFYTYGVKVVYPNGESAIETATLNITSLADVTAQKPYTLTVVGKTITVTCQGEAMIYDMNGRRLAAGRNTVVYTAQGGHYAVMVVVDGKSYVEKLAVK

SEQ ID NO: 235 - protein, 1732 aa, Unknown
  Sequence is from an organism putatively related to Porphyromonas gingivalis
MRKLLLLIAASLLGVGLYAQSAKIKLDAPTTRTTCTNNSFKQFDASFSFNEVELTKVETKGGTFASVSIPGAFPTGEVGSPEVPAVRKLIAVPVGATPVVRVKSFTEQVYSLNQYGSEKLMPHQPSMSKSDDPEKVPFVYNAAAYARKGFVGQELTQVEMLGTMRGVRIAALTINPVQYDVVANQLKVRNNIEIEVSFQGADEVATQRLYDASFSPYFETAYKQLFNRDVYTDHGDLYNTPVRMLVVAGAKFKEALKPWLTWKAQKGFYLDVHYTDEAEVGTTNASIKAFIHKKYNDGLAASAAPVFLALVGDTDVISGEKGKKTKKVTDLYYSAVDGDYFPEMYTFRMSASSPEELTNIIDKVLMYEKATMPDKSYLEKVLLIAGADYSWNSQVGQPTIKYGMQYYYNQEHGYTDVYNYLKAPYTGCYSHLNTGVSFANYTAHGSETAWADPLLTTSQLKALTNKDKYFLAIGNCCITAQFDYVQPCFGEVITRVKEKGAYAYIGSSPNSYWGEDYYWSVGANAVFGVQPTFEGTSMGSYDATFLEDSYNTVNSIMWAGNLAATHAGNIGNITHIGAHYYWEAYHVLGDGSVMPYRAMPKTNTYTLPASLPQNQASYSIQASAGSYVAISKDGVLYGTGVANASGVATVSMTKQITENGNYDVVITRSNYLPVIKQIQVGEPSPYQPVSNLTATTQGQKVTLKWEAPSAKKAEGSREVKRIGDGLFVTIEPANDVRANEAKVVLAADNVWGDNTGYQFLLDADHNTFGSVIPATGPLFTGTASSNLYSANFEYLVPANADPVVTTQNIIVTGQGEVVIPGGVYDYCITNPEPASGKMWIAGDGGNQPARYDDFTFEAGKKYTFTMRRAGMGDGTDMEVEDDSPASYTYTVYRDGTKIKEGLTATTFEEDGVAAGNHEYCVEVKYTAGVSPKVCKDVTVEGSNEFAPVQNLTGSSVGQKVTLKWDAPNGTPNPNPNPNPNPGTTLSESFENGIPASWKTIDADGDGHGWKPGNAPGIAGYNSNGCVYSESFGLGGIGVLTPDNYLITPALDLPNGGKLTFWVCAQDANYASEHYAVYASSTGNDASNFTNALLEETITAKGVRSPKAIRGRIQGTWRQKTVDLPAGTKYVAFRHFQSTDMFYIDLDEVEIKANGKRADFTETFESSTHGEAPAEWTTIDADGDGQGWLCLSSGQLDWLTAHGGSNVVSSFSWNGMALNPDNYLISKDVTGATKVKYYYAVNDGFPGDHYAVMISKTGTNAGDFTVVFEETPNGINKGGARFGLSTEANGAKPQSVWIERTVDLPAGTKYVAFRHYNCSDLNYILLDDIQFTMGGSPTPTDYTYTVYRDGTNIKEGLTETTFEEYGVATGNHEYCVEVKYTAGVSPKKCVDVTVNSTQFNPVQNLTAEQAPNSMDAILKWNAPASKRAEVLNEDFENGIPASWKTIDAHGDGNNWTTTPPPGGSSFAGHNSAICVSSASHINFEGPQNPDNYLVTPELSLPGGGTLTFWVCAQDANYASEHYAVYASSTGNDASNFANALLEEVLTAKTVVTAPEAIRGTRAQGTWYQKTVQLPAGTKYVAFRHFGCTDFFWINLDDVVITSGNAPSYTYTIYRNNTQIASGVTETTYRDPDLATGFYTYGVKVVYPNGESAIETATLNITSLADVTAQKPYTLTVVGKTITVTCQGEAMIYDMNGRRLAAGRNTVVYTAQGGHYAVMVVVDGKSYVEKLAVK

SEQ ID NO: 236 - protein, 991 aa, Unknown
  Sequence is from an organism putatively related to Porphyromonas gingivalis
MKNLNKFVSIALCSSLLGGMAFAQQTELGRNPNVRLLESTQQSVTKVQFRMDNLKFTEVQTPKGMAQVPTYTEGVNLSEKGMPTLPILSRSLAVSDTREMKVEVVSSKFIEKKNVLIAPSKGMIMRNEDPKKIPYVYGKSYSQNKFFPGEIATLDDPFILRDVRGQVVNFAPLQYNPVTKTLRIYTEITVAVSETSEQGKNILNKKGTFAGFEDTYKRMFMNYEPGRYTPVEEKQNGRMIVIVAKKYEGDIKDFVDWKNQRGLRTEVKVAEDIASPVTANAIQQFVKQEYEKEGNDLTYVLLVGDHKDIPAKITPGIKSDQVYGQIVGNDHYNEVFIGRFSCESKEDLKTQIDRTIHYERNITTEDKWLGQALCIASAEGGPSADNGESDIQHENVIANLLTQYGYTKIIKCYDPGVTPKNIIDAFNGGISLVNYTGHGSETAWGTSHFGTTHVKQLTNSNQLPFIFDVACVNGDFLFSMPCFAEALMRAQKDGKPTGTVAIIASTINQSWASPMRGQDEMNEILCEKHPNNIKRTFGGVTMNGMFAMVEKYKKDGEKMLDTWTVFGDPSLLVRTLVPTKMQVTAPAQINLTDASVNVSCDYNGAIATISANGKMFGSAVVENGTATINLTGLTNESTLTLTVVGYNKETVIKTINTNGEPNPYQPVSNLTATTQGQKVTLKWDAPSTKTNATTNTARSVDGIRELVLLSVSDAPELLRSGQAEIVLEAHDVWNDGSGYQILLDADHDQYGQVIPSDTHTLWPNCSVPANLFAPFEYTVPENADPSCSPTNMIMDGTASVNIPAGTYDFAIAAPQANAKIWIAGQGPTKEDDYVFEAGKKYHFLMKKMGSGDGTELTISEGGGSDYTYTVYRDGTKIKEGLTETTYRDAGMSAQSHEYCVEVKYAAGVSPKVCVDYIPDGVADVTAQKPYTLTVVGKTITVTCQGEAMIYDMNGRRLAAGRNTVVYTAQGGYYAVMVVVDGKSYVEKLAVK

SEQ ID NO: 237 - protein, 1050 aa, Unknown
  Sequence is from an organism putatively related to Porphyromonas gingivalis
MGVFAQELVRVSNNINEVRVIEEDNNGLLLNVEIGSYVKNDVSINGKTYYSITNDEGSLIYEKGYPDLPKITKSIAIPNNRGVKVSVVSFKLQDYKMEVAPSKGILDRTVNPNNVPYEFAKVYSTDEFYPKSYYSLGEPYLLHNQRGITIDFYPFVYNPITHTLRVVSSMVIKVEFEGQDTRNSTSKPKDSNRYFDAIYKEHFINSSTLKENRHNYGNEKMLIISKKDFMDEMQPFVEHKKRIGLKTEMVAVEDIGNNSDKIKEFIKSKYEADNKLTFILLVGDYKQVTTPFSGGGGSDPSYSLISGNDNYPDVMIGRFSAETEQEVTNMVNKTIKYETAKKNNETWFKKGLGIASNDGNGGGDDNEYDWEHLRKIRKELLKWKYTSIAELYDGSHGEEDAPGDPNPSMVAKVVNDGVSIINYTGHGSETSWVTTGFSNSGVKALTNANKLPFIFSVACVNGNFTSYTCFAEVWLRANKNNEPTGAIGFYGSSINQSWQPPMEAQDKFNELFYTEKFTTFGQLCFKGSCSMIDKYKSGGVAMFKTWIYFGDPSVSYVDNGPTAADLLIRDSEDDSGIEPSECSDINSPDINLRDQDTKQPITDITGYSKNNYITNITIKNIGGSASEGNGKERLHLFMSYPTISASSKISSLGYVRLTPTDGLAIDKLAANEQKVVESTLSWDIPKKQIQSYEQRIKNSFESTGFAPRRFDILAVADENGNSIIPSKDEVIRLTTNEKEFAKQSNSVSIGSLGNKALADENFSQVIELLPSADKSFVISLDKSAAIQDFAETNILLSNDLMANLITDGNEKIKVIDKNRVRILSSDAALEFRPLTNDQGNYFTGIEVHFFGDSIPAQKNFDLDLNYIEQGSNTVAEHFTAVRNSAVYFKAKAKASKAQDGGKDVIALEADDIGVEAKYTWYNSLGNVVGTGININIAPISTDTYTLEVERADNGYKSYAKVNVANLAPEGISLSPNPASSSVRVNYKLPENIANATLSISDMTGKVSKTYTIPNAVGEMFIEVTDLSAGVYIVRLASGSKTISSQKLIKK

SEQ ID NO: 238 - protein, 1683 aa, Unknown
  Sequence is from an organism putatively related to Porphyromonas gingivalis
MAFAQQTELGRNPNVRLLESTQQSVTKVQFRMDNLKFTEVQTPKGMAQVPTYTEGVNLSEKGMPTLPILSRSLAVSDTREMKVEVVSSKFIEKKNVLIAPSKGMIMRNEDPKKIPYVYGKSYSQNKFFPGEIATLDDPFILRDVRGQVVNFAPLQYNPVTKTLRIYTEITVAVSETSEQGKNILNKKGTFAGFEDTYKRMFMNYEPGRYTPVEEKQNGRMIVIVAKKYEGDIKDFVDWKNQRGLRTEVKVAEDIASPVTANAIQQFVKQEYEKEGNDLTYVLLIGDHKDIPAKITPGIKSDQVYGQIVGNDHYNEVFIGRFSCESKEDLKTQIDRTIHYERNITTEDKWLGQALCIASAEGGPSADNGESDIQHENVIANLLTQYGYTKIIKCYDPGVTPKNIIDAFNGGISLANYTGHGSETAWGTSHFGTTHVKQLTNSNQLPFIFDVACVNGDFLFSMPCFAEALMRAQKDGKPTGTVAIIASTINQSWASPMRGQDEMNEILCEKHPNNIKRTFGGVTMNGMFAMVEKYKKDGEKMLDTWTVFGDPSLLVRTLVPTKMQVTAPAQINLTDASVNVSCDYNGAIATISANGKMFGSAVVENGTATINLTGLTNESTLTLTVVGYNKETVIKTINTNGEPSPYQPVSNLTATTQGQKVTLKWDAPSTKTNATTNTARSVDGIRELVFLSVSDAPELLRSGQAEIVLEAHDVWNDGSGYQILLDADHDQYGQVIPSDTHTLWPNCSVPANLFAPFEYTVPENADPSCSPTNMIMDGTASVNIPAGTYDFAIAAPQANAKIWIAGQGPTKEDDYVFEAGKKYHFLMKKMGSGDGTELTISEGGGSDYTYTVYRDGTKIKEGLTATTFEEDGVAAGNHEYCVEVKYTAGVSPKVCKDVTVEGSNEFAPVQNLTGSAVGQKVTLKWDAPNGTPNPNPNPNPGTTTLSESFENGIPASWKTIDADGDGHGWKPGNAPGIAGYNSNGCVYSESFGLGGIGVLTPDNYLITPALDLPNGGKLTFWVCAQDANYASEHYAVYASSTGNDASNFTNALLEETITAKGVRSPEAIRGRIQGTWRQKTVDLPAGTKYVAFRHFQSTDMFYIDLDEVEIKANGKRADFTETFESSTHGEAPAEWTTIDADGDGQGWLCLSSGQLDWLTAHGGTNVVASFSWNGMALNPDNYLISKDVTGATKVKYYYAVNDGFPGDHYAVMISKTGTNAGDFTVVFEETPNGINKGGARFGLSTEANGAKPQSVWIERTVDLPAGTKYVAFRHYNCSDLNYILLDDIQFTMGGSPTPTDYTYTVYRDGTKIKEGLTETTFEEDGVATGNHEYCVEVKYTAGVSPKKCVNVTVNSTQFNPVKNLKAQPDGGDVVLKWEAPSAKKTEGSREVKRIGDGLFVTIEPANDVRANEAKVVLAADNVWGDNTGYQFLLDADHNTFGSVIPATGPLFTGTASSNLYSANFEYLIPANADPVVTTQNIIVTGQGEVVIPGGVYDYCITNPEPASGKMWIAGDGGNQPARYDDFTFEAGKKYTFTMRRAGMGDGTDMEVEDDSPASYTYTVYRDGTKIKEGLTETTYRDAGMSAQSHEYCVEVKYAAGVSPKVCVDYIPDGVADVTAQKPYTLTVVGKTITVTCQGEAMIYDMNGRRLAAGRNTVVYTAQGGYYAVMVVVDGKSYVEKLAIK

SEQ ID NO: 239 - protein, 526 aa, Unknown
  Sequence is from an organism putatively related to Porphyromonas gingivalis
MRQVRFLICCVFLWGMSCLLHAQMLVVCAPEYMEEMKPFVTWKIQKGIPTQMVSMSEIGETYEDLGDYVKNYYQTHHNRYLLLVGDANQVPINYLPGYDVTPFTPYTDAEYGYVSGTYPPEVLVGRLSAETADDVKVQVEKIIFYEKNVDENASWLSQCVGIADPLATDKGDNDETDIQHIRQVNSILEQYGYTAHETSTKKELTDLLNAGCGIVNYAGHGFMSGWATSDFSVSDVAALSNEGKFPVIISTGCDNGKFATGTCFAESFLRARNSAGDPIGAVGMLGFSAQVTWNPPMLGQDEMVRIMTSPDIPDSRKTFGEVANEAYRKVIEKYRGSGEDAAKEWILFGDPSMVLRTRTPGKMVVSHIEAADNGITSLSVSCDKDGAVVALSEGNNLLAVQTVEKGKAMLDFPAVTGDKILTVTVTAFDKVTYMGQVVIGDGSGLGVADSDASVTIYPNPSRGEIRIDGLSASSAFISIYSLDGSLIRKAEVDPNTSIPLNVEPGTYFLHLQSDGRYIVRRILVTE

SEQ ID NO: 240 - protein, 751 aa, Unknown
  Sequence is from an organism putatively related to Porphyromonas gingivalis
MKKIITLFLLFLTSFQLFASNEVKLVNENQNSLTISVDFNEYSIVPFEEISGVMHSKIIAQNTYPSLSLGNPNLPRLTCAIELPATGSSSYTIISSSFKEYENIFIAPSKGNLKRNVNPSLVPFTKSNTYNSDVFYPENMISLNNPFIFRSVRGQSIEIIPFQYNPVTNVLRVYTNIELKVQFNEKKSGINEINSSNVLNRHINNINSRRFINYKSEKYTPVEEDGSMLVICKDDLMDDMEGFLNWKFSKGMTTELVPISSIGNNQSSIYNYVKNYYTSNPDLVYLLIVGDHADVKSYNAGSTGQEIKWSDSKYGLLAGNNDWYPDVFVGRFSASNSTDLQTILSRNMEYEISPVSGDWYQKALGIGSDEGQGYGDNGEADWQHLRNIRTDLMNYGFTEVFEFYDGSHGGQDANGSPNSNMIKNAVNAGVTLFNYTGHGAQNSCATGNFSSTHINQCNNQGKYPFVISVACNNGTFTNGTCLSEQFMLAEQSGSPTGAISVCGSSILMSWAPPMASQDEVVDILIESYAQNKKFTLGGLFYNGQMDMMDAYNNSGREVVETWIFFGDPSVKIRTLNPTDLIASHATELDLGSSSLTISNCNAEGALICLTQGNNQLGTGLVDANGEVTISFPALDSIVDLTVVGTNYNFRPYQGNVKVIEPGVDVEPTFTVFPNPISTNEALTVSFNLNEDADVIFSILNGIGQLVQQVELSGLNAGTHQEIISISGYRTGIYKIAATINGDKVVSKFMVK

SEQ ID NO: 241 - protein, 763 aa, Unknown
  Sequence is from an organism putatively related to Porphyromonas gingivalis
MSKSDDPEKVPFVYNAAAYARKGFVGQELTQVEMLGTMRGVRIAALTINPVQYDVVANQLKVRNNIEIEVSFQGADEVATQRLYDASFSPYFETAYKQLFNRDVYTDHGDLYNTPVRMLVVAGAKFKEALKPWLTWKAQKGFYLDVHYTDEAEVGTTNASIKAFIHKKYNDGLAASAAPVFLALVGDTDVISGEKGKKTKKVTDLYYSAVDGDYFPEMYTFRMSASSPEELTNIIDKVLMYEKATMPDKSYLEKVLLIAGADYSWNSQVGQPTIKYGMQYYYNQEHGYTDVYNYLKAPYTGCYSHLNTGVSFANYTAHGSETAWADPLLTTSQLKALTNKDKYFLAIGNCCITAQFDYVQPCFGEVITRVKEKGAYAYIGSSPNSYWGEDYYWSVGANAVFGVQPTFEGTSMGSYDATFLEDSYNTVNSIMWAGNLAATHAGNIGNITHIGAHYYWEAYHVLGDGSVMPYRAMPKTNTYTLPASLPQNQASYSIQASAGSYVAISKDGVLYGTGVANASGVATVSMTKQITENGNYDVVITRSNYLPVIKQIQVGEPSPYQPVSNLTATTQGQKVTLKWEAPSAKKAEGSREVKRIGDGLFVTIEPANDVRANEAKVVLAADNVWGDNTGYQFLLDADHNTFGSVIPATGPLFTGTASSNLYSANFEYLIPANADPVVTTQNIIVTGQGEVVIPGGVYDYCITNPEPASGKMWIAGDGGNQPARYDDFTFEAGKKYTFTMRRAGMGDGTDMEVEDDSPASYTY

SEQ ID NO: 242 - protein, 1687 aa, Unknown
  Sequence is from an organism putatively related to Porphyromonas gingivalis
MAFAQQTELGRNPNVRLLESTQQSVTKVQFRMDNLKFTEVQTPKGMAQVPTYTEGVNLSEKGMPTLPILSRSLAVSDTREMKVEVVSSKFIEKKNVLIAPSKGMIMRNEDPKKIPYVYGKSYSQNKFFPGEIATLDDPFILRDVRGQVVNFAPLQYNPVTKTLRIYTEITVAVSETSEQGKNILNKKGTFAGFEDTYKRMFMNYEPGRYTPVEEKQNGRMIVIVAKKYEGDIKDFVDWKNQRGLRTEVKVAEDIASPVTANAIQQFVKQEYEKEGNDLTYVLLVGDHKDIPAKITPGIKSDQVYGQIVGNDHYNEVFIGRFSCESKEDLKTQIDRTIHYERNITTEDKWLGQALCIASAEGGPSADNGESDIQHENVIANLLTQYGYTKIIKCYDPGVTPKNIIDAFNGGISLVNYTGHGSETAWGTSHFGTTHVKQLTNSNQLPFIFDVACVNGDFLFSMPCFAEALMRAQKDGKPTGTVAIIASTINQSWASPMRGQDEMNEILCEKHPNNIKRTFGGVTMNGMFAMVEKYKKDGEKMLDTWTVFGDPSLLVRTLVPTKMQVTAPAQINLTDASVNVSCDYNGAIATISANGKMFGSAVVENGTATINLTGLTNESTLTLTVVGYNKETVIKTINTNGEPNPYQPVSNLTATTQGQKVTLKWDAPSTKTNATTNTARSVDGIRELVLLSVSDAPELLRSGQAEIVLEAHDVWNDGSGYQILLDADHDQYGQVIPSDTHTLWPNCSVPANLFAPFEYTVPENADPSCSPTNMIMDGTASVNIPAGTYDFAIAAPQANAKIWIAGQGPTKEDDYVFEAGKKYHFLMKKMGSGDGTELTISEGGGSDYTYTVYRDGTKIKEGLTATTFEEDGVATGNHEYCVEVKYTAGVSPKVCKDVTVEGSNEFAPVQNLTGSAVGQKVTLKWDAPNGTPNPNPNPNPNPNPGTTTLSESFENGIPASWKTIDADGDGHGWKPGNAPGIAGYNSNGCVYSESFGLGGIGVLTPDNYLITPALDLPNGGKLTFWVCAQDANYASEHYAVYASSTGNDASNFTNALLEETITAKGVRSPEAIRGRIQGTWRQKTVDLPAGTKYVAFRHFQSTDMFYIDLDEVEIKANGKRADFTETFESSTHGEAPAEWTTIDADGDGQGWLCLSSGQLDWLTAHGGTNVVASFSWNGMALNPDNYLISKDVTGATKVKYYYAVNDGFPGDHYAVMISKTGTNAGDFTVVFEETPNGINKGGARFGLSTEANGAKPQSVWIERTVDLPAGTKYVAFRHYNCSDLNYILLDDIQFTMGGSPTPTDYTYTVYRDGTKIKEGLTETTFEEDGVATGNHEYCVEVKYTAGVSPKECVNVTINPTQFNPVKNLKAQPDGGDVVLKWEAPSAKKTEGSREVKRIGDGLFVTIEPANDVRANEAKVVLAADNVWGDNTGYQFLLDADHNTFGSVIPATGPLFTGTASSNLYSANFEYLIPANADPVVTTQNIIVTGQGEVVIPGGVYDYCITNPEPASGKMWIAGDGGNQPARYDDFTFEAGKKYTFTMRRAGMGDGTDMEVEDDSPASYTYTVYRDGTKIKEGLTETTYRDAGMSAQSHEYCVEVKYAAGVSPKVCVDYIPDGVADVTAQKPYTLTVVGKTITVTCQGEAMIYDMNGRRLAAGRNTVVYTAQGGYYAVMVVVDGKSYVEKLAVK

SEQ ID NO: 243 - protein, 1358 aa, Unknown
  Sequence is from an organism putatively related to Porphyromonas gingivalis
PEELTNIIDKVLMYEKATMPDKSYLEKVLLIAGADYSWNSQVGQPTIKYGMQYYYNQEHGYTDVYNYLKAPYTGCYSHLNTGVSFANYTAHGSETAWADPLLTTSQLKALTNKDKYFLAIGNCCITAQFDYVQPCFGEVITRVKEKGAYAYIGSSPNSYWGEDYYWSVGANAVFGVQPTFEGTSMGSYDATFLEDSYNTVNSIMWAGNLAATHAGNIGNITHIGAHYYREAYHVLGDGSVMPYRAMPKTNTYTLPASLPQNQASYSIQASAGSYVAISKDGVLYGTGVANASGVATVNMTKQITENGNYDVVITRSNYLPVIKQIQAGEPSPYQPVSNLTATAQGQKVTLKWDAPSAKKAEGSREVKRIGDGLFVTIEPANDVRANEAKVVLAADNVWGDNTGYQFLLDADHNTFGSVIPATGPLFTGTASSNLYSANFEYLTPANADPVVTTQNIIVTGQGEVVIPGGVYDYCITNPEPASGKMWIAGDGGNQPARYDDFAFEAGKKYTFTMRRAGMGDGTDMEVEDDSPASYTYTVYRDGTKIKEGLTATTFEEDGVAAGNHEYCVEVKYTAGVSPKVCKDVTVEGSNEFAPVQNLTGSAVGQKVTLKWSAPNGTPNPNPNPNPNPGTTTLSESFENGIPASWKTIDADGDGNNWTTTPPPGGSSFAGHNSAICVSSASYINFEGPQNPDNYLVTPELSLPNGGTLTFWVCAQDANYASEHYAVYASSTGNDASNFADALLEEVLTAKTVVTAPEAIRGTRVQGTWYQKTVQLPAGTKYVAFRHFGCTDFFWINLDDVEIKASGKRADFTETFESSTHGEAPAEWTTIDADGDGQGWLCLSSGQLDWLTAHGGTNVVASFSWNGMALNPDNYLISKDVTGATKVKYYYAVNDGFPGDHYAVMISKTGTNAGDFTVVFEETPNGINKGGARFGLSTEANGAKPQSVWIERTVDLPAGTKYVAFRHYNCSDLNYILLDDIQFTMGGSPTPTDYTYTVYRDGTKIKEGLTETTFEEDGVATGNHEYCVEVKYTAGVSPKECVNVTINPTQFNPVQNLTAEQAPNSMDAILKWNAPASKRAEVLNEDFENGIPASWKTIDADGDGNNWTTTPPPGGSSFAGHNSAICVSSASYINFEGPQNPDNYLVTPELSLPGGGTLTFWVCAQDANYASEHYAVYASSTGNDASNFANALLEEVLTAKTVVTAPEAIRGTRAQGTWYQKTVQLPAGTKYVAFRHFGCTDFFWINLDDVVITSGNAPSYTYTIYRNNTQIASGVTETTYRDPDLATGFYTYGVKVVYPNGESAIETATLNITSLADVTAQKPYTLTVVGKTITVTCQGEAMIYDMNGRRLAAGRNTVV

SEQ ID NO: 244 - protein, 439 aa, Unknown
  Sequence is from an organism putatively related to Porphyromonas gingivalis
  misc_feature (244)..(244): Xaa can be any naturally occurring amino acid
YTPVEEKENGRMIVIVPKKYEEDIEDFVDWKNQRGLRTEVKVAEDIASPVTANAIQQFVKQEYEKEGNDLTYVLLVGDHKDIPAKITPGIKSDQVYGQIVGNDHYNEVFIGRFSCESKEDLKTQIDRTIHYERNITTEDKWLGQALCIASAEGGPSADNGESDIQHENIIANLLTQYGYTKIIKCYDPGVTPKNIIDAFNGGISLANYTGHGSETAWGTSHFGTTHVKQLTNSNQLPFIFDVAXVNGDFLYNVPCFAEALMRAQKDGKPTGTVAIIASTINQSWASPMRGQDEMNEILCEKHPNNIKRTFGGVTMNGMFAMVEKYKKDGEKMLDTWTVFGDPSLLVRTLVPTKMQVTAPANISASAQTFEVACDYNGAIATLSDDGDMVGTAIVKDGKAIIKLNESIADETNLTLTVVGYNKVTVIKDVKVEGHHHHHH

SEQ ID NO: 245 - protein, 813 aa, Unknown
  Sequence is from an organism putatively related to Porphyromonas gingivalis
MSKSDDPEKVPFVYNAAAYARKGFVGQELTQVEMLGTMRGVRIAALTINPVQYDVVANQLKVRNNIEIEVSFQGADEVATQRLYDASFSPYFETAYKQLFNRDVYTDHGDLYNTPVRMLVVAGAKFKEALKPWLTWKAQKGFYLDVHYTDEAEVGTTNASIKAFIHKKYNDGLAASAAPVFLALVGDTDVISGEKGKKTKKVTDLYYSAVDGDYFPEMYTFRMSASSPEELTNIIDKVLMYEKATMPDKSYLEKVLLIAGADYSWNSQVGQPTIKYGMQYYYNQEHGYTDVYNYLKAPYTGCYSHLNTGVSFANYTAHGSETAWADPLLTTSQLKALTNKDKYFLAIGNCCITAQFDYVQPCFGEVITRVKEKGAYAYIGSSPNSYWGEDYYWSVGANAVFGVQPTFEGTSMGSYDATFLEDSYNTVNSIMWAGNLAATHAGNIGNITHIGAHYYWEAYHVLGDGSVMPYRAMPKTNTYTLPASLPQNQASYSIQASAGSYVAISKDGVLYGTGVANASGVATVSMTKQITENGNYDVVITRSNYLPVIKQIQAGEPSPYQPVSNLTATTQGQKVTLKWDAPSAKKAEGSREVKRIGDGLFVTIEPANDVRANEAKVVLAADNVWGDNTGYQFLLDADHNTFGSVIPATGPLFTGTASSDLYSANFEYLIPANADPVVTTQNIIVTGQGEVVIPAGVYDYCITNPEPASGKMWIAGDGGNQPARYDDFTFEAGKKYTFTMRRAGMGDGTDMEVEDDSPASYTYTVYRDGTKIQEGLTATTFEEDGVAAGNHEYCVEVKYTAGVSPKVCKDVTV

SEQ ID NO: 246 - protein, 305 aa, Unknown
  Sequence is from an organism putatively related to Porphyromonas gingivalis
DFVDWKNQRGLRTEVKVAEDIASPVTANAIQQFVKQEYEKEGNDLTYVLLVGDHKDIPAKITPGIKSDQVYGQIVGNDHYNEVFIGRFSCESKEDLKTQIDRTIHYERNITTEDKWLGQALCVASAEGGPYADNGESDIQHENVIADLLTQYGYTKIIKCYDPGATAKKIIDAFNGGISLANYTGHGSETAWVTSHFGTTHVKQLTNSNQLPFIFDVACVNGDFLYNVPCFAEALMRAQKDGKPTGTVAIIASTINQSWASPMRGQDEMNEILCEKHPNNIKRTFGGVTMNGMFAMVEKYKKDGE

SEQ ID NO: 247 - protein, 1115 aa, Unknown
  Sequence is from an organism putatively related to Porphyromonas gingivalis
MRFFNLFFLFIFSASLLARDYQIDYQKIASDAHQLTFTLFNYEIKIVDEDGSVFSDLDFSSSVKLEQKGYAALPFVHATLQLPPLKNMDLHIEAVETEEIQLRYPMLPSRGVIYRNQDPDTIPYWIDPASITDSWYPEAFVRQSRPFILKDVRGATVYFYPFQYNAATKTLKVFKSIKITLTENDSNPINPLIRMPGYKILPEMDGIYQTTFLNYTRNTQDLDYGQHGDILVISTDRDTAAVAPYIVWKREKGFNVALEVVPKGTNVKSLIQQKYDENNNLLYVLLIGDYDDVQSDKGTSENGPMDPQLGCVVGDDYYADISVGRLSANSPADVTVQVNKIIEYEKNPDAGMDWYKSALGIGSAEGSGSGDDGEVDKDHIQNIWDNKLDPFTYDIFSTAYDPGATDAMVANAVNDGVSIINYCGHGSMTSWGTTGFDNNDVANLTNGDMLPFIFSVACVNGAFDDGDCFAEAWLQKDNGGAVMFLGSTINQPWQPPMRGQDYFNDILIGGYNYDDHPGQNGINTHEQRTFIGSIVINGFALMLNESSSSSDVETVQTWCTFGDPALQVRTQAPADVTLSNENIEAGTPFSTTVTSGGQPVADAMVCISQNGMYYSALTDANGQVTIEHTFEQDSALLVVTAFNKQTVYKKIPVSGGQGPNIVVDSYQINDQSTGNNNAQVEYQEQFYLDVAAKNIGNEPGIDVDAQLSSNDTYIQIQDNSHFYGTIDTSAVVPGPQAFLLQAADGTPDQHTVNCTVTFSDTSTRQWTSDISFVVNAPDLGNGSLTIYDGAQGDDDGILDAGETADMSIPLFNQGHAASESGKATLTTSSPYLTIHTDSVAIAPLAVQDTVACVFTVSASSDAPEGEVAELYFNAVCGAYTSIDTFKINIGGKAIYLMQDGTFEVTDGYFYDSGGKDGNYGTSENSTLTFLPADRAAVKVVFHSFSTIANYDKLYIYDGPDDTYPQVPGSPFSGDQNPGEIEATNDAGALTFHFVSNPILGGTGWEADVFTTGVSAARERSAAINDFRLLNNYPNPFNPSTTIRFQIPRQTEVQILIFNLLGQKVKTLFEGKRGVGIHQLSWDGHDDAGQAVSSGIYIVQARAGQHVARQKILLVK

SEQ ID NO: 248 - protein, 736 aa, Unknown
  Sequence is from an organism putatively related to Porphyromonas gingivalis
MKKNFSRIVSIVAFSSLLGGMAFAQPAERGRNPQVRLLSAEQSMSKVQFRMDNLQFTGVQTSKGVAQVPTFTEGVNISEKGTPILPILSRSLAVSETRAMKVEVVSSKFIEKKDVLIAPSKGVISRAENPDQIPYVYGQSYNEDKFFPGEIATLSDPFILRDVRGQVVNFAPLQYNPVTKTLRIYTEIVVAVSETAEAGQNTISLVKNSTFTGFEDIYKSVFMNYEATRYTPVEEKENGRMIVIVPKKYEEDIEDFVDWKNQRGLRTEVKVAEDIASPVTANAIQQFVKQEYEKEGNDLTYVLLVGDHKDIPAKITPGIKSDQVYGQIVGNDHYNEVFIGRFSCESKEDLKTQIDRTIHYERNITTEDKWLGQALCIASAEGGPSADNGESDIQHENIIANLLTQYGYTKIIKCYDPGVTPKNIIDAFNGGISLANYTGHGSETAWGTSHFGTTHVKQLTNSNQLPFIFDVACVNGDFLYNVPCFAEALMRAQKDGKPTGTVAIIASTINQSWASPMRGQDEMNEILCEKHPNNIKRTFGGVTMNGMFAMVEKYKKDGEKMLDTWTVFGDPSLLVRTLVPTKMQVTAPANISASAQTFEVACDYNGAIATLSDDGDMVGTAIVKDGKAIIKLNESIADETNLTLTVVGYNKVTVIKDVKVEGTSIADVANDKPYTVAVSGKTITVESPAAGLTIFDMNGRRVATAKNRMVFEAQNGVYAVRIATEGKTYTEKVIVK

SEQ ID NO: 249 - protein, 1706 aa, Unknown
  Sequence is from an organism putatively related to Porphyromonas gingivalis
MKNLNKFVSIALCSSLLGGMAFAQQTELGRNPNVRLLESTQQSVTKVQFRMDNLKFTEVQTPKGMAQVPTYTEGVNLSEKGMPTLPILSRSLAVSDTREMKVEVVSSKFIEKKNVLIAPSKGMIMRNEDPKKIPYVYGKSYSQNKFFPGEIATLDDPFILRDVRGQVVNFAPLQYNPVTKTLRIYTEITVAVSETSEQGKNILNKKGTFAGFEDTYKRMFMNYEPGRYTPVEEKQNGRMIVIVAKKYEGDIKDFVDWKNQRGLRTEVKVAEDIASPVTANAIQQFVKQEYEKEGNDLTYVLLIGDHKDIPAKITPGIKSDQVYGQIVGNDHYNEVFIGRFSCESKEDLKTQIDRTIHYERNITTEDKWLGQALCIASAEGGPSADNGESDIQHENVIANLLTQYGYTKIIKCYDPGVTPKNIIDAFNGGISLANYTGHGSETAWGTSHFGTTHVKQLTNSNQLPFIFDVACVNGDFLFSMPCFAEALMRAQKDGKPTGTVAIIASTINQSWASPMRGQDEMNEILCEKHPNNIKRTFGGVTMNGMFAMVEKYKKDGEKMLDTWTVFGDPSLLVRTLVPTKMQVTAPAQINLTDASVNVSCDYNGAIATISANGKMFGSAVVENGTATINLTGLTNESTLTLTVVGYNKETVIKTINTNGEPNPYQPVSNLTATTQGQKVTLKWDAPSTKTNATTNTARSVDGIRELVLLSVSDAPELLRSGQAEIVLEAHDVWNDGSGYQILLDADHDQYGQVIPSDTHTLWPNCSVPANLFAPFEYTVPENADPSCSPTNMIMDGTASVNIPAGTYDFAIAAPQANAKIWIAGQGPTKEDDYVFEAGKKYHFLMKKMGSGDGTELTISEGGGSDYTYTVYRDGTKIKEGLTATTFEEDGVAAGNHEYCVEVKYTAGVSPKVCKDVTVEGSNEFAPVQNLTGSAVGQKVTLKWDAPNGTPNPNPNPNPNPNPGTTTLSESFENGIPASWKTIDADGDGHGWKPGNAPGIAGYNSNGCVYSESFGLGGIGVLTPDNYLITPALDLPNGGKLTFWVCAQDANYASEHYAVYASSTGNDASNFTNALLEETITAKGVRSPEAIRGRIQGTWRQKTVDLPAGTKYVAFRHFQSTDMFYIDLDEVEIKANGKRADFTETFESSTHGEAPAEWTTIDADGDGQGWLCLSSGQLDWLTAHGGTNVVSSFSWNGMALNPDNYLISKDVTGATKVKYYYAVNDGFPGDHYAVMISKTGTNAGDFTVVFEETPNGINKGGARFGLSTEADGAKPQSVWIERTVDLPAGTKYVAFRHYNCSDLNYILLDDIQFTMGGSPTPTDYTYTVYRDGTKIKEGLTETTFEEDGVATGNHEYCVEVKYTAGVSPKKCVNVTVNSTQFNPVKNLKAQPDGGDVVLKWEAPSAKKTEGSREVKRIGDGLFVTIEPANDVRANEAKVVLAADNVWGDNTGYQFLLDADHNTFGSVIPATGPLFTGTASSDLYSANFEYLIPANADPVVTTQNIIVTGQGEVVIPGGVYDYCITNPEPASGKMWIAGDGGNQPARYDDFTFEAGKKYTFTMRRAGMGDGTDMEVEDDSPASYTYTVYRDGTKIKEGLTETTYRDAGMSAQSHEYCVEVKYTAGVSPKVCVDYIPDGVADVTAQKPYTLTVVGKTITVTCQGEAMIYDMNGRRLAAGRNTVVYTAQGGYYAVMVVVDGKSYVEKLAIK

SEQ ID NO: 250 - protein, 736 aa, Unknown
  Sequence is from an organism putatively related to Porphyromonas gingivalis
MKKNFSRIVSIVAFSSLLGGMAFAQPAERGRNPQVRLLSAEQSMSKVQFRMDNLQFTDVQTSKGVAQVPTFTEGVNISEKGTPILPILSRSLAVSETRAMKVEVVSSKFIEKKDVLIAPSKGVISRAENPDQIPYVYGQSYNEDKFFPGEIATLSDPFILRDVRGQVVNFAPLQYNPVTKTLRIYTEIVVAVSETAEAGQNTISLVKNSTFTGFEDIYKSVFMNYEATRYTPVEEKENGRMIVIVAKKYEGDIKDFVDWKNQRGLRTEVKVAEDIASPVTANAIQQFVKQEYEKEGNDLTYVLLVGDHKDIPAKITPGIKSDQVYGQIVGNDHYNEVFIGRFSCESKEDLKTQIDRTIHYERNITTEDKWLGQALCIASAEGGPSADNGESDIQHENVIANLLTQYGYTKIIKCYDPGVTPKNIIDAFNGGISLVNYTGHGSETAWGTSHFGTTHVKQLTNSNQLPFIFDVACVNGDFLFSMPCFAEALMRAQKDGKPTGTVAIIASTINQSWASPMRGQDEMNEILCEKHPNNIKRTFGGVTMNGMFAMVEKYKKDGEKMLDTWTVFGDPSLLVRTLVPTEMQVTAPANISASAQTFEVACDYNGAIATLSDDGDMVGTAIVKDGKAIIKLNESIADETNLTLTVVGYNKVTVIKDVKVEGTSIADVANDKPYTVAVSGKTITVESPAAGLTIFDMNGRRVATAKNRMVFEAQNGVYAVRIATEGKTYTEKVIVK

SEQ ID NO: 251 - protein, 1723 aa, Unknown
  Sequence is from an organism putatively related to Porphyromonas gingivalis
MRKLLLLIAASLLGVGLYAQSAKIKLDAPTTRTTCTNNSFKQFDASFSFNEVELTKVETKGGTFASVSIPGAFPTGEVGSPEVPAVRKLIAVPVGATPVVRVKSFTEQVYSLNQYGSEKLMPHQPSMSKSDDPEKVPFVYNAAAYARKGFVGQELTQVEMLGTMRGVRIAALTINPVQYDVVANQLKVRNNIEIEVSFQGADEVATQRLYDASFSPYFETAYKQLFNRDVYTDHGDLYNTPVRMLVVAGAKFKEALKPWLTWKAQKGFYLDVHYTDEAEVGTTNASIKAFIHKKYNDGLAASAAPVFLALVGDTDVISGEKGKKTKKVTDLYYSAVDGDYFPEMYTFRMSASSPEELTNIIDKVLMYEKATMPDKSYLEKALLIAGADSYWNPKIGQQTIKYAVQYYYNQDHGYTDVYSYPKAPYTGCYSHLNTGVGFANYTAHGSETSWADPSLTATQVKALTNKDKYFLAIGNCCVTAQFDYPQPCFGEVMTRVKEKGAYAYIGSSPNSYWGEDYYWSVGANAVFGVQPTFEGTSMGSYDATFLEDSYNTVNSIMWAGNLAATHAGNIGNITHIGAHYYWEAYHVLGDGSVMPYRAMPKTNTYTLPASLPQNQASYSIQASAGSYVAISKDGVLYGTGVANASGVATVNMTKQITENGNYDVVITRSNYLPVIKQIQAGEPSPYQPVSNLTATTQGQKVTLKWDAPSAKKAEASREVKRIGDGLFVTIEPANDVRANEAKVVLAADNVWGDNTGYQFLLDADHNTFGSVIPATGPLFTGTASSNLYSANFEYLIPANADPVVTTQNIIVTGQGEVVIPGGVYDYCITNPEPASGKMWIAGDGGNQPARYDDFTFEAGKKYTFTMRRAGMGDGTDMEVEDDSPASYTYTVYRDGTKIQEGLTATTFEEDGVAAGNHEYCVEVKYTAGVSPKVCKDVTVEGSNEFAPVQNLTGSAVGQKVTLKWDAPNGTPNPNPNPNPGTTTLSESFENGIPASWKTIDADGDGHGWKPGNAPGIAGYNSNGCVYSESFGLGGIGVLTPDNYLITPALDLPNGGKLTFWVCAQDANYASEHYAVYASSTGNDASNFTNALLEETITAKGVRSPEAIRGRIQGTWRQKTVDLPAGTKYVAFRHFQSTDMFYIDLDEVEIKANGKRADFTETFESSTHGEAPAEWTTIDADGDGQDWLCLSSGQLDWLTAHGGTNVVASFSWNGMALNPDNYLISKDVTGATKVKYYYAVNDGFPGDHYAVMISKTGTNAGDFTVVFEETPNGINKGGARFGLSTEANGAKPQSVWIERTVDLPAGTKYVAFRHYNCSDLNYILLDDIQFTMGGSPTPTDYTYTVYRDGTKIKEGLTETTFEEDGVATGNHEYCVEVKYTAGVSPKVCVNVTINPTQFNPVKNLKAQPDGGDVVLKWEAPSGKRGELLNEDFEGDAIPTGWTALDADGDGNNWDITLNEFTRGERHVLSPLRASNVAISYSSLLQGQEYLPLTPNNFLITPKVEGAKKITYKVGSPGLPQWSHDHYALCISKSGTAAADFEVIFEETMTYTQGGANLTREKDLPAGTKYVAFRHYNCTDVLGIMIDDVVITGEGEGPSYTYTVYRDGTKIQEGLTETTYRDAGMSAQSHEYCVEVKYAAGVSPKVCVDYIPDGVADVTAQKPYTLTVVGKTITVTCQGEAMIYDMNGRRLAAGRNTVVYTAQGGYYAVMVVVDGKSYVEKLAIK

SEQ ID NO: 252 - protein, 1733 aa, Unknown
  Sequence is from an organism putatively related to Porphyromonas gingivalis
MRKLLLLIAASLLGVGLYAQSAKIKLDAPTTRTTCTNNSFKQFDASFSFNEVELTKVETKGGTFASVSIPGAFPTGEVGSPEVPAVRKLIAVPVGATPVVRVKSFTEQVYSLNQYGSEKLMPHQPSMSKSDDPEKVPFVYNAAAYARKGFVGQELTQVEMLGTMRGVRIAALTINPVQYDVVANQLKVRNNIEIEVSFQGADKVATQRLYDASFSPYFETAYKQLFNRDVYTDHGDLYNTPVRMLVVAGAKFKEALKPWLTWKAQKGFYLDVHYTDEAEVGTTNASIKAFIHKKYNDGLAASAAPVFLALVGDTDVISGEKGKKTKKVTDLYYSAVDGDYFPEMYTFRMSASSPEELTNIIDKVLMYEKATMPDKSYLEKVLLIAGADYSWNSQVGQPTIKYGMQYYYNQEHGYTDVYNYLKAPYTGCYSHLNTGVSFANYTAHGSETAWADPLLTTSQLKALTNKDKYFLAIGNCCITAQFDYVQPCFGEVITRVKEKGAYAYIGSSPNSYWGEDYYWSVGANAVFGVQPTFEGTSMGSYDATFLEDSYNTVNSIMWAGNLAATHAGNIGNITHIGAHYYWEAYHVLGDGSVMPYRAMPKTNTYTLPASLPQNQASYSIQASAGSYVAISKDGVLYGTGVANASGVATVNMTKQITENGNYDVVITRSNYLPVIKQIQAGEPSPYQPVSNLTATTQGQKVTLKWDAPSAKKAEGSREVKRIGDGLFVTIEPANDVRANEAKVVLAADNVWGDNTGYQFLLDADHNTFGSVIPATGPLFTGTASSDLYSANFEYLIPANADPVVTTQNIIVTGQGEVVIPGGVYDYCITNPEPASGKMWIAGDGGNQPARYDDFTFEAGKKYTFTMRRAGMGDGTDMEVEDDSPASYTYTVYRDGTKIQEGLTATTFEEDGVAAGNHEYCVEVKYTAGVSPKVCKEVTVEGSNEFAPVQNLTGSAVGQKVTLKWDAPNGTPNPNPNPNPNPGTTTLSESFENGIPASWKTIDADGDGHGWKPGNAPGIAGYNSNGCVYSESFGLGGIGVLTPDNYLITPALDLPNGGKLTFWVCAQDANYASEHYAVYASSTGNDASNFTNALLEETITAKGVRSPEAIRGRIQGTWRQKTVDLPAGTKYVAFRHFQSTDMFYIDLDEVEIKANGKRADFTETFESSTHGETPAEWTTIDADGDGQGWLCLSSGQLGWLTAHGGTNVVASFSWDGMALNPDNYLISKDVTGATKVKYYYAVNDGFPGDHYAVMISKTGTNAGDFTVVFEETPNGINKGGARFGLSTEANGAKPQSVWIERTVDLPAGTKYVAFRHYNCSDLNYILLDDIQFFMGGSPNPTDYTYTVYRDGTKIKEGLTETTFEEDGVATGNHEYCVEVKYPAGVSPKECVNVTINPTQFNPVQNLTAEQAPNSMDAILKWNAPASKRAEVLNEDFENGIPSSWKTIDADGDGNNWTTTPPPGGSSFAGHNSDICVSSASYINFEGPQNPDNYLVTPELSLPGGGTLTFWVCAQDANYASEHYAVYASSTGNDASNFANALLEEVLTAKTVVTAPEAIRGTRAQGTWYQKTVQLPAGTKYVAFRHFGCTDFFWINLDDVVITSGNAPSYTYTIYRNNTQIASGVTETTYRDPDLATGFYTYGVKVVYPNGESAIETTTLNITSLADVTAQKPYTLTVVGKTITVTCQGEAMIYDMNGRRLAAGRNTVVYTAQGGYYAVMVVVDGKSYVEKLAVK

SEQ ID NO: 253 - protein, 736 aa, Unknown
  Sequence is from an organism putatively related to Porphyromonas gingivalis
MKKNFSRIVSIVAFSSLLGGMAFAQPAERGRNPQVRLLSAEQSMSKVQFRMDNLQFTDVQTSKGVAQVPTFTEGVNISEKGTPILPILSRSLAVSETRAMKVEVVSSKFIEKKDVLIAPSKGVISRAENPDQIPYVYGQSYNEDKFFPGEIATLSDPFILRDVRGQVVNFAPLQYNPVTKTLRIYTEIVVAVSETAEAGQNTISLVKNSTFTGFEDIYKSVFMNYEATRYTPVEEKENGRMIVIVPKKYEEDIEDFVDWKNQRGLRTEVKVAEDIASPVTANAIQQFVKQEYEKEGNDLTYVLLIGDHKDIPAKITPGIKSDQVYGQIVGNDHYNEVFIGRFSCESKEDLKTQIDRTIHYERNITTEDKWLGQALCIASAEGGPSADNGESDIEHENVIANLLTQYGYTKIIKCYDPGATAKKIIDAFNGGISLANYTGHGSETVWVTSYFGTTHVKQLTNSNQLPFIFDVACVNGDFLYNVPCFAEALMRAQKDGKPTGTVAIIASTINQYWAPPMRGQDEMNEILCEKHPNNIKRTFGGVTMNGMFAMVEKYKKDGEKMLDTWTVFGDPSLLVRTLVPTEMQVTAPANISASAQTFEVACDYNGAIATLSDDGDMVGTAIVKDGKAIIKLNESIADETNLTLTVVGYNKVTVIKDVKVEGTSIADVANDKPYTVAVSGKTITVESPAAGLTIFDMNGRRVATAKNRMVFEAQNGVYAVRIATEGKTYTEKVIVK

SEQ ID NO: 254 - protein, 1228 aa, Unknown
  Sequence is from an organism putatively related to Porphyromonas gingivalis
MKKTLFFVILLLSFIGLTAEQIVVSQYPDDIRLTNSNPNNMELEFTLGSFYREPVNIDGEQWFHLFLKKEGLTLEAGMPQVPVLARSLIIPATAKMHLNITNSEYVELTLPVAPSKGNLTRDIDPATIPYTFADFYQSGESYPAEIAYLTEPFILRDYRGITVRFQPFIYYPATQTLRVYTKLNISVYTQGTDLTNALLSPKTSYSRYFESTYQNMFLNFSAAKYPSLDEEGRILVIKHSMFDATIQPWVDWKRQLGFTVDVVDVTTAGSTAANIKTYIQNQYNLNDGLMFVQLVGDAPQIPTLTYSGGGSDPSYALLAGNDNYYDIFVGRFSAQTVAELETQVTRSIYYERDIAPGATWLEKAIGIASAEGGGGQGDMGESDIAHMNNIRTDLLNYGYTTVDQIYDPGATAAQVTTSVNQGRGFINYVGHGADTYWVTTNFNNNNANALTNDYMLPFIVSVACVNGNFVSQTCFAEAWMRSVNETTNAPAGAIAFWGSTINQSWAPPMRAQDEVTDLLVGNFKHRIGSLLFNGAHKMLEVYGSQGLDDARTWTIFGDASLMVRTKNPQVITATYNPVLFLGMSSFAVQTIPGGRITLTNNGIIYGKGIADATGNCVINLDIIPDLPMDMTLTIIAFDYQTYIQTIQVLPSSGPYLVVEETTFSDVNDNIFTTGETVFLDMNLSNIGSETATSVSVTLSTNDSYVTLLNPTLTIGDIANGTVSSAGTFQIQLSNSIPDEHTVNLHIFIATSDGETFENNCNFIAYAPAISWGPLQINDSLGNNNGRIDAGENVTITFNVTNSGHCDAADISTTLIVNGVSHLITPIISTIENLPVSQTGQMIYNVTFSSQIPMGTSVQLTAMTMFGEYLSIHTYTIVVGIVMENFDFGFSNFPWVFEGGNWTISPDSFNGSMAAKSPSINNNSSSSISITYQCPQAGEISFWKKVSSEPSCDFLKFYINGILKFQWSGTDDFWSQVTYPVSPGTNVFKWEYVKDNGSYQGSDCAWLDDIIFPSTGEQIGIPVFVIDMEAIDFGEVIVNTIVSQTVTICNCGTASMLGTIATESPFSLGEPIMPAYYLEYIIPVGESFTFNVNFQPLQNSVYTGNLIINSDDPNALVNTIPLYGTGQPVANDDPVAVLVTSLKGCYPNPFNPTTTISFSIKEKTPVELIIYNILGQKVRTLVNQPLEPGEHSVVWNGTDNKGRSVASGIYFYRMKAGNYSETQKMVLKK

SEQ ID NO: 255 - protein, 2023 aa, Unknown
  Sequence is from an organism putatively related to Porphyromonas gingivalis
MSEKFAFKLITLLVLLAIASLCFADANQKVIFSNSGNKAQLLNNNAEGFELQFRNQEYFLEEVETPSGKFTRINMDGFGFSQRIGEPQLPVYSKLIAVPVGAKVEFSFGRNTEITLQKSETLITNRIYPAQPSVSKSQDPALISFELKTDIYSKNEFYSGELFSVAEIGFLRGVRIFRIDYEPMRYNPVSGELKINTELNVQVKFINADFSATQDLLARTASYEFDSLYGKILLNWQKDERLNVNRYPTKMVILCPPNYVSTMQTFVNWKTQQGYKVIVTTVGTGGTVANNTTAIKNYMQTLWNSATASDPAPTYLLIVGDTSTSGDNIIANTGGTSSSHITDLTYVQLNGTDYLPELYFGRFSVASATELTNVINKTITFEKTTMPDLSYLGKTVLIAGADATYGPTHGNGAINYGTTQYFNSAHNITSNTYLYPASGSSNAQIIANASEGRGYINYTAHGSQTSWADPTFTISDINGLNNTNKYSVVVGNCCLTNAFDTGVCFGEAFLRANNKGAVTYIGGTNSTYWDEDYWWAVGSKGTANGSAPAYDASKLGAYDAMFHTHSEAFTNWATTVGEAVMMGNSAVVQAGSSLSNYYWEIYSIMGDPSLMPYYGVPTTNTATFPASIIIGATSITVTATPYSRVALSKDGVLYGSDIVPASGTLTLTINPITTAGTATLVITAQNKITRIENITVNAGDTPYISVDSCTYSDSNNNIPEYNETGYYSVTFKNLGQVASSSATATLTCSTTGITITDGTEALSAIAAGGTLTKTNAFRFNVANNITNQLQANFKITITSGTYTWEYNFTQTLYAPALAFGDITISDPTGNNNGKLDPGETATLSIPLNNSGGANSPAGAATLTCTTTGITINNGSASFTAITAGSSANLNFTITAASSVSQGTLAALNFNATAGAYTAAKTQNLEIGAPTVVTIGTGTSTQSYPLDRYYNYSAFEAIYLASELQYAGTIKSIGFYKASGNDVSPIDSVTIYMKNTTETSLSDGTYATTGYTQVYSGSFTNDATSGWMSVDLSPQFTCNGSNLAILIVKGNQAYTSDYPNWTYTTTPTTRVRCNHSDSAAPTSLTVSTSLPNLQIKIFPTPGFLYPPQNLTAAPRNGSVILSWQAPVSGQPTGYKIYKNSALLTTVPGLTYTDNAVVNGTTYSYYLKAVYATGESNPTATVTATPFNVFETGAIIGSGTASTGTTEASPINVYYQSLHGQSVYTKAELNAAGVVGPVYISQVGFNVTGVPNKTMPNFVVRMKHTPATDVSSWIDNTDLITVYTNANYTISTTGYNMLTLSTPFLWNGTDNLLIDTAFGLIGSYSSTGTVQYTSMANGYRFTRNDYADQTNVFSSGSTSVYKPNVKLILTAVSGNPQISVNPTSFSFGSVAVGTTSTQNFTIINTGGSTLTGSIITPTGYSVTAAVKEMRNTLSFSIPAGQSKTYILSFSPVSAISYNGNVTISSNSQTQANLSLPVTGSGFIPPTISVNTNTLSATLITGAESTQTFTISNTGSQSLTYTMVVSEPTGRNEVIIPAKTTGSKSIAGSTLTLNADEYTSGTTVDWTFTVTNASTDTEWLKEVIVTFPAGVTVNSATNFVGGSGGDLIPDLTTGTGITISWFGTGSSGWGVIYGSESATATVNVTIGTGLVTTIVLPYTINGDEYNAEPHTVSGEISLACSLPPVEWFSVTPNSGNIPAGGNQTISGHFSAVGMAEGIYNAVLTIQSNDPVHPITTLPVTMDVSSGNHSPRITLPESFSFAKNGSLTVAFASYISDADNDPLTLSVSGNNHIHIAINGTQVTFTADLNWVGSENITFGVSDGELTAYDNVIVIVNPVNVPDWQPIVYPNNPATVYAQVSIEGIPAQLNDLVGAFVNNECRGTGEIVLIDRATAYSTILVNLASDGELVQFKIYSYANDTVYPVQETLTMQTGNVYGSAENPVVLNGTFNIVLTPPQVNLVSYQNTYRLTWNAVPNANNYRIYSCSEPYGTYQLVHTTANLYWEIPTTQQKCFFKVVAEQIGISKGK

SEQ ID NO: 256 - protein, 1263 aa, Unknown
  Sequence is from an organism putatively related to Porphyromonas gingivalis
MKKISFILLLVFTTAILVAASGTIKLQDNPAKVQLLEKSDTGLSIAYAVDELQFREINTKEGIFTELNALNYTTTNVTGLPALPLMRQLISVPLGANVTANIISSSTKVINLDEQGVLYPLMPRQESVSKSANLEQLPFEVNRDFYNANMWTDNPSITVTEIGMMRGTRIFAVDFVPIKYNPVLKKIEVIYQAEVKVAFSGANFIATNELQAKTYSPAFEGVFAQTLINYNAPKVSFLRYPIGYVIILPDNFIAPMQPFIDWKKQEGYNVIVAPTSITGTTTTSIKAYMQNLWNSATTENPAPSYLLIVGDVAQVPTNNGNTGSHPTDLTYVRLQGTDYMPEMYFGRFSATSVAEVTNQVNKTLMHEQYTMPSDAYLSEVVMIAGVDSYYSTTHANGQINYGTNNYFNPAHNITSHTYLYPASGSSASAIVQNASNGMGYINYTAHGDVTEWYNPNFSISNINSLQNTNKYSYVVGNCCLTSKFDNPICFAEAWLRATNKGAIIYIGGTNSTYWDEDYWWGVGYKPPVVGTGSPFVAGRTGAYDALFHDHNEPFADWAGNAGSNVVMGNMAVVQSNSSRINYYWEIYSIMGDPSLVPYLGIPAQNAYTPPAQMFLGFNSMDIQTDPYSYVALSMNNELHGVGLADASGNLTLNYTPFTEPGIAKLVITRSLRKPLIANIEIIPNEGPYVTVGPLELNDGNNNIAEAGDNINISLQFNNVGIETASNLTATLTCDSPYILLNNATVQLPDIASGNSINQTNAFQISILPDVPDQHLAGFNITVSDGEDTWVTQRSLTINAPNVVFGNHTLFDSNSDGIYQPGETVTISLSISNTGHMNVDGGSLAIVLNSPYAALDNYNFIIPPLTAGNGIPIVLHLFISQDCPNDEVIPIGFAMNAGIQLLNHSIMIPVGIIGESFESGDFTAFPWVNNSTNPWTIISGTSNAHFGNYAAKSGAIGNNGSTTLQITMEVSSAGNISFWRKVSSEANYDWLKFYIDNNETGSWSGEIGWSEVSYPVTAGSHIFKWTYSKDVGSVSGSDCAWLDDIRFPGMGVLETAIFYTTTTQIEFTNVLPNTTVSVDFALRNLGNLAMQGIITCPPDFELSQYGNALPANYTYQIEAGQTVLYTLSYIAGNSVSEIQTNMQITTNDPHHPVVIIPVNLYPLANDDNVNIPYVTALHKNYPNPFNPETTIHYSLSEAGPVKIEVYNIKGQLVRNLVNERKTAGNYTVIWNGKDEQGKNVSSGIYFYRMQTKNYSSTKKMMLMK

SEQ ID NO: 257 - protein, 1228 aa, Unknown
  Sequence is from an organism putatively related to Porphyromonas gingivalis
MKKTLFFVILLLSFIGLTAEQIVVSQYPDDIRLTNSNPNNMELEFTLGSFYREPVTINGDSWYHLFLKKEGLTLEAGMPQVPVLARSLIIPALAKMHLNITNSEYVELTLPVAPSKGNLTRDIDPATIPYTFADFYQSGESYPAEIAYLTEPFILRDYRGITVRFQPFIYYPATQTLRVYTKLNISVYAQGTDLTNALLNPKTSYSRYFESTYQNMFLNFSAAKYPSLDEEGRILVIKHSMFDATIQPWVDWKRQLGFTVDVVDVTQAGSTAANIKTYIQNQYDLNNGLMFVQLVGDAPQIPTLTYSGGGSDPSYALLAGNDNYYDIFVGRFSAQTVAELETQVARSIYYERDIAPGATWLEKAIGIASAEGGSGQGDMGESDITHMNNIRTDLLNYGYTTVDQIYDPGATAAQVSNSVNQGRGFINYCGHGADTYWVTTNFNNNNANALTNDYMLPLIVSVACVNGNFVSQTCFAEAWMRSVNETTNAPAGAITFWGSTINQSWAPPMRGQDEVTDLLVGNLKYRVGGLLFNGAHKIIEVYGSQGLADARTWTIFGDASLMVRTKNPQVITATFNPVLFLGMSSFAVQTIPGGRITLTNNGIIYGKGIADATGNCVINLDIIPDLPMDMTLTISAFDYQTYIQTIQVLPSSGPYLVVEETTFSDVNDNIFTTGETVFLDMNLSNIGSETATSVSVTLSTNDSYVTLLNPILTIGDIDSGNVSSAGTFQIQLSNSIPDEHTVNLYIFIATSDGETFENNCSFIAYAPAITWGPLQIDDSLGNNNGRIDAGENVTITFNVTNSGHCDAADISTTLIVNGVSHLITPIISTIENLPVSQTGQMIYNVTFSSQIPMGTSVQLTAMTMFGEYLSVHTYTIVVGIVMENFDFGFSNFPWVFEGGNWTISPDSFNGSMAAKSPSINNNSSTSISITYQCPQAGEISFWKKVSSEPSCDFLKFYINGILKFQWSGTDDFWSQVTYPVSPGTNVFKWEYVKNNGSYQGSDCAWLDDIIFPSTGEQIGIPVFVIDMEDINFGDVIVNTIVSQTVTICNCGTASMLGTIATESPFSLGEPSMPAYYLEYIIPVGESFTFNVNFQPLQNSVYTGTLIINSDDPNALVNTIPLYGTGQPVANDDPVAVLVTSLKGCYPNPFNPTTTISFSIKEKAPVELIIYNILGQKVRTLVNQSLEPGEHSIVWNGTDNKGRSVASGIYFYRMKAGNYSETKKMVLKK

SEQ ID NO: 258 - protein, 1228 aa, Unknown
  Sequence is from an organism putatively related to Porphyromonas gingivalis
MKKTLFFVILLLSFIGLTAEQIVVSQYPDDIRLTNSNPNNMELEFTLGSFYREPVTINGDSWYHLFLKKEGLTLEAGMPQVPVLARSLIIPATAKMHLNITNSEYVELTLPVAPSKGNLTRDIDPATIPYTFTDFYQSGESYPAEIAYLTEPFILRDYRGITVRFQPFIYYPATQTLRVYTKLNISVYAQGTDLTNALLNPKTSYSRYFESTYQNMFLNFSAAKYPSLDEEGRILVIKHSMFDATIQPWVDWKRQLGFTVDVVDVTQAGSTAANIKTYIQNQYDLNNGLMFVQLVGDAPQIPTLTYSGGGSDPSYALLAGNDNYYDIFVGRFSAQTVAELETQVARSIYYERDIAPGATWLEKAIGIASAEGGSGQGDMGESDIAHMNNIRTDLLIYGYTTVDQIYDPGATAAQVSNSVNQGRGFINYCGHGADTYWVTTNFNNNNANALTNDYMLPLIVSVACVNGNFVSQTCFAEAWMRSVNETTNAPAGAITFWGSTINQSWAPPMRGQDEVTDLLVGNLKYRVGGLLFNGAHKIIEVYGSQGLADARTWTIFGDASLMVRTKNPQVITATFNPVLFLGMSSFAVQTIPGGRITLTNNGIIYGKGIADATGNCVINLDIILDLPMDMTLTISAFDYQTYIQTIQVLPSSGPYLVVEETTFSDVNDNIFTTGETVFLDMNLSNIGSETATSVSVTLSTNDSYVTLLNPTLTIGDISSGTVSSTGTFQIQLSNSIPDEHTVNLHIFIATSDGETFENNCSFIAYAPAITWGPLQINDSLGNNNGRIDAGENVTITFNVTNSGHCDAADISTTLIVNGVSHLITPIISTIENLPVSQTGQMIYNVTFSSQIPMGTSVQLTAMTMFGEYLSVHTYTIVVGIVMENFDFGFSNFPWVFEGGNWTISPDSFNGSMAAKSPSINNNSSSSISITYQCPQAGEISFWKKVSSEPSCDFLKFYINGILKFQWSGTDDFWSQVTYPVSPGTNVFKWEYVKDNGSYQGSDCAWLDDIIFPSTGEQIGIPVFVIDMENINFGEVIVNTIVSQTVTICNCGTASMLGTITTESPFSLGEPIMPAYYLEYIIPVGESFTFNVNFQPLQNSAYTGTLIVNSDDPNALVNTIPLYGTGQPVANDDPVAVLVTSLKGCYPNPFNPTTTISFSIKEKTPVELVIYNILGQKVRTLVNQPLEPGEHSVVWNGTDNKGRSVASGIYFYRMKAGNYSETQKMVLKK

SEQ ID NO: 259 - protein, 2023 aa, Unknown
  Sequence is from an organism putatively related to Porphyromonas gingivalis
  misc_feature (1671)..(1671): Xaa can be any naturally occurring amino acid
MSEKFAFKLIILMVLLAIASLCFADANQKVIFSNSGNKAQLLNNNAEGFELQFRNQEYFLEEVETPSGKFTRINMDSFGYSQRIGEPQLPVYSKLIAVPVGAKVEFSFGRNTEITLSKSETNITNRIYPTQPSVSKSQDPALIPFELKTDIYSKNEFYSGELFSVEEIGFLRGVRIFRIDYEPMRYNPVSGELKINTELNVQVKFINADFSATQDLLARTASYEFDSLYGKILLNWQKNERLNVNRYPTKMVILCPPNYVSTMQTFVNWKTQQGYNVIVTTVGTGGTVANTTTAIKNYMQTLWNNATASDPAPTYLLIVGDTSTSGDNIIANTGGTDSSHITDLNYVRLNGTDYLPELYYGRFSVASATELTNVINKTLQFEQTTMPDLSYLGKTVLIAGVDSNFGPTHGNGAINYGTTQYFNSAHNITSNTYLYPASGSSDAQIIANASEGRGYINYTAHGSQTSWADPTFTISDINGLNNTNKYSVVVGNCCLTNAFDTGVCFGEAFLRANNKGAVSYIGGTNSTYWDEDYWWAVGSKGTANGSAPAYDASKLGAYDAMFHTHSEAFTNWATTVGEAVMMGNSAVEQSSSTLKNYYWEIYSIMGDPSLMPYYGVPTTNTATFPASIIIGATSITVTATPYSRVALSKDGVLYGSDLVPASGTLTLTINPITTAGTATLVITAQNKITRIENITVAAGDTPYISVDSCTYSDSNNNIPEYNETGYYSVTFKNLGQVASSSATATLTCSTTGITITDGTESLSAIAAGGTLTKNNAFRFNVANNITNQLQANFKITITSGTYTWEYNFTQTLYAPALSFGDIAISDPTGNNNGKLDPGETATLSIPLNNSGGANSPAGSATLTCTTTGITINNGSASFTAITAGSSANLTFSITAASSVSQGTLAALNFNATAGAYTAAKTQNLEIGAPTVVTIGTGTSTQSYPLDRYYNYSAFEAIYLASELQYIGTIKSIGFYKASGSDVNPIEAVTIYMKNTAESTLSTGTYSTTGYTQVYSGSFTNDATSGWMSVDLSPQFTCNGSNLAILIVKGYQSWTSNYPNWTYTTTTTTRVRCNRDDSAAPTSLTGSTSLPNLQIKIFPTPGILYPPQNLTAIPGNGSVTLNWQAPLSGQPTGYKIYKNSALLTTVTGLTYTDTAVVNGTTYSYYLKAVYATGESSSTATVTATPFNVFETGAIIGTGTASTGTTEASPINVYYKSLHGQSVYTKAELNNAGVFGPVYISQVGFNVTGLPDKTMPNFVVRMKHTTATDVSSWIDNTNLVTVYTNASYTISTTGYNMLTLSTPFLWNGTDNLLIDTAFGLIGSYSQTGTVQYTPVTNGYRYTRSDSADQTNVFSSGSTSSSKPNVKLFLTAVAGNPQISVNPTSFTFGSVAVGTTSTQNFTITNTGGSTLTGSIITPTGYSVTAAAKEIRNTLSFSIPAGQSKTYILSFSPVSAISYNGNVTISSNSQTQANLSLPVTGSGYLPPTISVNTNALSATLTTGAESTQTFTISNTGSQPLTYTMVVSEPAGRNEAISPVKTTGSKSIAGSTLTLNADEYNSGTTVDWTFTVTNASTDTEWLKEIIVTFPAGVTVNSATNFVGGSGGDLIPDLTTGAGITINWSGTGSSGWGVIYGSESASATVNVTISAGLVTTIVIPYTINGDEYNAEPHTVSXEISLACSLPPVEWFSVTPNSGTITAGGNQTISGHFSAVGMAEGIYNAVLTIQSNDPVHPVTTIPVTMDVSSGNHSPHINLPESFSFDKNGSLTENFASYISDADNDPLTLSVSGNNHIHIAINGTQVTFTADLNWVGSENITFGVSDGELTAYDNVIVIVNPVNVPDWQPIVYPNNPATVYAQVSIEGIPAQLNDLVGAFVNNECRGTGEIVLIDRATAYSTILVNLASDGELVQFKIYSYANDAVYPVQETLTMQTGSVYGSAENPVVLNGTFNIVLTPPQVNLVSHQNTFRLTWNAVPNANNYRIYSCSEPYGTYQLVHTTANLYWEIPTTQQKCFFKVVAEQIGISKGK

SEQ ID NO: 260 - protein, 1226 aa, Unknown
  Sequence is from an organism putatively related to Porphyromonas gingivalis
MKRKEGISWGNNRLLILLSLIVMLVIVNAEGDVVHVATFPEAGGIKIQINLTSDPEIKKETIDGNTFTRIKIPEMGTSGSIGEPELPAWRRYIEVPPNATDVSLTYNKQTISEELEIQYPLYPVQPPWEKKEGVQRPKLTINDDVYNSNEKHGENLAEIAQYGNVRGKNLYQITYYPVSYDPLNSKISITKNLLLDIRWNIPKTALSRDSKYFSKYIDDLWNPYILNSSLFNEKAKSIGYNIPVGMLVIVAAPFMGNSKLNEWVQWKTQRGFIVTVENVANIGTNSTAIRNYIKQAYNNWEVPPTFVVLVGDPYYIQAPAGYASNNPITDLYYSIVDGEEYYTPDLWVGRISVSSSTQLQNALNKILKYEKAQWTLTEPWYIKASFLTGSDNYDTTEGTHNYVISNYFEPAEFVSQKLYTVTYGATSSDVISAINSGRGWVVYSGHGSDVSWADGPPISQSDVNSLTNAVYPWILSFACDTGQYAKPECFGETWQRASAGGVGFLGSSVTSYWDEDDMFEKFIIESFFSLKKTWTAGMILNGKLKFFNYYGDTNTTKRYFEMYNLLGDPSTEIWMGILQNPYITHGSGVDPNGLPLSVYIEWENAVISISNSNTLLGAARSNFGSNLVSFSPPGIVPLVKLTITGNPIVPYQVDLPVVVGADGSIQWDKTIYNGSSLATLVLADANLSGQGEISIPVRSGSGDNEQIILTETQVSGFFEGTIQLTTLSTESNDGLLSVIHNGLITAEYYDEFTGSGSPQTITAESTTDIYPPQLLQLSVVPDIKNVDVQLETDEICSARFEYGSQCTIPFEKYENSLAMDTNHKFLIAGLIADTEYTYRIVLTDIAGNEYSTDCSTFTTLHQPDYFTYYYTSNIVDTVPLSNHRIIFVPDNSSDRYHACLQSINEFPKATTNATPITIGDDAFALIEFPLETYVYLYGVQYSQCYVGSNGYVTFTQGNDDYAESLERHFAIPRISLMFDDLDPSKAGSISYQFDTDAFIVTFSKVSRYGSGEANVQLEMFYDGTISITWLNCVSSGFIAGLSNGGGIPPNFELSDFLSYKECIPQEGILEGDYEGISEGEGVAEGEGITEGNIEGVMEGEGIIEGIVEGDNEGNVDGEGNIEGTLEGEYIFFHSSDINRNGIIDLDELLRIIQLFNSGGYHCNINSKIEDGYLPGYGENHECQAHSSDYNPQDWVISFSELIRAIQIFNIRRYYPCPGESEDSFCF

SEQ ID NO: 261 - protein, 1226 aa, Unknown; identical to SEQ ID NO: 260
  Sequence is from an organism putatively related to Porphyromonas gingivalis

SEQ ID NO: 262 - protein, 711 aa, Porphyromonas gulae
MRKLLLLIAASLLGVGLYAQNAKIKLDAPTTRATCTNNSFKQFDASFSFNEVELTKVETKGGTFASVSIPGAFPTGEIGSPEVPAVRKLIAVPVGATPIVRVKNFTEQVYSLNQYGSEKLMPHQPSMSKSDDPEKVPFVYNAAAYARKGFVGQELTQVEVLGTMRGVRVAALTINPVQYDAAANQLKVRNNIEIEVSFQGADEVATQRLYDASYSPYFETAYKQLFNKDVYTDHPDLYKTPARMLVVAGAKFKEALKPWLTWKAQKGFYLDVHYTDEAEVGTTNASIKAFIHKKYNDGLAANAAPVFLALIGDTDVISGEKGKKTKEVTDLYYSAVDGDYFPEMYSFRMSASSGEELKNIIDKVLMYEKATMPDKSYLEKVLLIAGADYNWNPKVGQQTIKYGMQYYFNQEHGYTDVYSYLKAPYTGCYSHLNTGVSFVNYTAHGSETSWADPSLTTSQLKALTNKDKYFLAIGNCCITAQFDYPQPCFGEVITRVKEKGAYAYIGSSPSSYWGEDYYWSVGANAVFGVQPTYEGTTMGSYDATFLEDSYNTVNSIMWAGNLAATHAGNIGNITHIGAHYYWEAYHVLGDGSVMPYRAMPKTNTYTLPASLPQNQATYSIQASAGSYVAISKDGVLYGTGVANASGVATVNMTKLITENGNYDVVITRSNYLPVIKQVQAGEPSPYQPVSNLSATVEGQKVTLKWEAPAAG

SEQ ID NO: 263 - protein, 1263 aa, Cloacimonetes
MKKISFILLLVFTTAILVAASGTIKLQDNPAKVQLLEKSDTGLSIAYAVDELQFREINTKEGIFTELNALNYTTTNVTGLPALPLMRQLISVPLGANVTANIISSSTKVINLDEQGVLYPLMPRQESVSKSANLEQLPFEVNRDFYNANMWTDNPSITVTEIGMMRGTRIFAVDFVPIKYNPVLKKIEVIYQAEVKVAFSGANFIATNELQAKTYSPAFEGVFAQTLINYNAPKVSFLRYPIGYVIILPDNFIAPMQPFIDWKKQEGYNVIVAPTSITGTTTTSIKAYMQNLWNSATTENPAPSYLLIVGDVAQVPTNTGNTGTHPTDLTYVRLQGTDYMPEMYFGRFSATSVAEVTNQVNKTLMHEQYTMPNDAYLSEVVMIAGVDNSYGPTHANGQINYGTTNYFNTAHNITSHTYLYPNSGSSETAIVQNLSNGVGYANYTAHGDVTYWYDPNITISNVNSLQNTNKYSYVVGNCCLTSKFNDSICFAEAWLRATNKGAIIYIGGTNSTYWDEDYWWGVGYKPPVVGTGSPFVAGHTGAYDALFHDHNEPFADWAGNAGSNVVMGNMAVVQSNSSRINYYWEIYSIMGDPSLVPYLGIPAQNAYTPPAQMFLGFNSMDIQTDPYSYVALSMNNESHGVGLADASGNLTLNYTPFTEPGIAKLVITRSLRKPLIANIEIIPNEGPYLTVGPLELNDGNNNIAEAGDNINISLQFNNVGIETASNLTATLTCDSPYILLNNATVQLPDIASGNSINQTNAFQISILPDVPDQHLAGFNITVSDGEDTWVTQRSLTINAPNVVFGNHTLFDSNSDGIYQPGETVTISLSISNTGHMNVDGGSLAIVLNSPYAALDNYNFIIPPLTAGNGIPIVLHLFISQDCPDDEVIPIGFAMNAGIQLLNHSIMIPVGIIGESFESGDFAAFPWVNNSTNPWTIISGTSNAHFGNYAAKSGAIGNNGSTTLQITMEVSSAGNISFWRKVSSEANYDWLKFYIDNNETGSWSGEIGWSEVSYPVTAGSHIFKWTYSKDTGIVSGSDCAWLDDIRFPGMGVLETAIFYTTTTQIEFTNVLPNTTVSIDFALRNLGNLAMQGIITCPPDFELSQYGNALPANYAYQIEAGQTVFYTLSYIAGNSVSELQTNMQITTNDPHHPVVIIPVNLFPLANDDNVNIPYVTALHKNYPNPFNPETTIHYSLSESGPVKIEVYNIKGQLVRNLVNERKTAGNYTVIWNGKDEQGKNVSSGIYFYRMQTKNYSSTQKMMLMK

SEQ ID NO: 264 - protein, 1162 aa, unclassified Cloacimonetes
MKKSLLVVIILLFAVSLIHAKDMFSFSSKGNGVEIQFENNNDLSSEVENAFTTIALPSEDIEIIIHDFTLLEYSEKGEFLKNVEKIDNSRIEKVNSFTMRELRGHTLQIKTQIYNEKEHTYSKIEKLNFEIVPRNVQSAPQYLSKAFYKLYPQLVDNFDESYLAGLPVQPSKMLIICHQLLENYIQDFIDWKQAKGIECTVATLLETGTTANEIKAYIQQVYDTSDVPPDYVLLIGDMDDYFAVPSFYYGAENDVTDHPYTMLTGSDYFPELIIGRMSIDEINQLWTIINKVISYEKTPYLANPEWLKEALLVAGNYSNTPPTPSTPVKVSRWLRDKMLNYGFTQVDTVFYPPTYPGTSEIISRINDGIGFLNYRGWGDANGWHYPEFHVDNMSSLSNGLLMPVVTSFVCNTGDFANTSADPCFGEAILQLGTPTAPQGGVVFIGPSDLHTSTKLNNSIFSGFYYGLLDEGIYDFGSAVLRGKIELYHNFPLQQAASDQVEFYFHVYNILGDPTLTMWTTIPEDIDCSIPASVTVGTNHLDISCTNLDEGIVTAKKADEFYEVAMLENGHAIIPFASESTGEIEIVITSPNFIAFVDTIAVLEQAIDVGLYEYEALSAVEAGTTLDVDLTLKNFGTSTASNVSATLSSSSSMVSVITPTKNFGDIAPDATSQQTYEIEIDAVCPDNEVLEFTLNISTGATAKFSLIASSLLFDVIDVTVNSPSGWLEPGENDEIQVTIENIGSLDGVSIQGMLAALSDAAEVTSADYDFGSVLITETSAGTFDVSIESNCFIGRNIPFELTLADESDRITHVYFSLEVGPVDNTAPTGPDAFGYYAYDSYDVDYDEVPVYNWIEIDPDEGGLGQVIFMADDESSTIPLPFTFTYYNEAFDEITVCSNGWISFITNDWTNFRNWDIPSALGPYGQVCAYWDDLIGEAYTIVDTTYHHDMRICHYYDAAENKFIVEWNKCFNRFDDVSVEKFELILLDPAYYPTTSGNGEMQCNYHTINNPDATSNYSTVGIENLTQSDGILYTFADIYPASATLLENELAIKYTTDPPDPYYAIDEEPAGMKSTLTIYPQPSSGSTVISYYAKDASATNLTAGIYNIKGQLVKEIIFDSSDNKCRQYTWNCLDDHNKKSPNGIYFVKIHENNSTEIGKIIILR

SEQ ID NO: 265 - protein, 1293 aa, unclassified Cloacimonetes
MKKFFILISLLILASTLFAGQQTWVPLNKDAEQDVVVNVLTSNDNLIEIEYAVNGFYKEEVLIDGKAYSKIILPHEGLFLDRGYPELPHINRSVLIPPRSHMEITIVHSDFVEFKNIDVMPSKGSFSREIDPEDVPYTFDAMYHEDAWYPEEIVFARDPYIMRDARGMVIQIQPIQYNPVQHKLRVYTNISVQVTENGYSDVNTKDVGLFEKESVVASFLEIYKTQFINFERASQHYRHTPTPAVGSMLIITYDDFADEMQPLYEWKNKKGIPTQMVNVSTLGNNYTTIKNYIQNLYDTWNLAFILLVGDAPQVTPYENNKDPLYACLEGGDLYPDAFVGRFSAESSAHVETQVDRVLYYESNPLISGDWMHKGTGVASAQGSGIGYNGWADYVMMNIIRDSLLAWNYTHVDQIYDPSGTASDVSNAINNGRSLVNYCGHGSTTSWGTTGFSVSNINALTNDYMYPSVICVACLNGNFVSSTCFAEAWARATNSTTGIPTGAIGVYASVISQDWQPPMIAEYHANMFLVNEKVTTLGNYFFSGAMQMMDENFSGGTNEFKYWTVFGDPSVKLRTNTPAALTVNHNPIIPLGSTTYDVEVVGVENALVGLYMDGTLYGYGYTDETGLVTVNLDVPLVNPGQMTLTVTAYNTIPYITLLDAIVPVQVDITPDNINVNQLTDVTVTVMDSDGINPEIGVNVWAEGLDFTSDIIVTDTNGEAVLSINFQFGPTLQICGQRPGDDYLLFNEALIINALSLTDPNIDVTTTFGLYDTLAMNLEATINQYCTDNGTMLWAKLNNNGYTNTLSNSLLMTPDELGIVRAIISKTGYDLYEEDFPVIVAFGTVSGTLTDSDNGSAISSAEVRFFEEGAVPDDDPLFTAVTNSSGFYNVTSDQAVDHYDIYINKWGFNPYQELSYFLGYGANTHDMQLDPVESGFISGNVYDDFIILGNATLSYCRSDNGEEYASVQTAGGGYEVSLPNFTYTLYVTAEGHVPYIGTLTVNGDAQYDYHLGYADLYSDFEANDGNFVSSYAGGWQWGEPTAGGITAHSGINLWATVLGGYYGTNYADWTLDSPEFTVPADATLYFWHYYDFEGTTTLWDGGNVTISTNGGTAYSLITPEGGYTGNISALSAQGFGGQLDEWEQVEFDLSSYAGSTANMRWNFGSDTSVNSYYGWYIDDVLIGDPSTSYEIPAVSVDDPHPVQTVSLHQNFPNPVQNSTTFSFALPQNIQKVELSIYNIKGQLVKTFSPNIDDGPHFEIEWNGKDSSNKSVASGVYFYRLTTGQKEITKKLLLLQ

SEQ ID NO: 266 - protein, 1328 aa, Cloacimonetes bacterium SCGC AAA252-G08
MKKTLVLALLFTFVASLAFASSSRIALEKAETKFEITENSYYNLDITFEFSEITTLDVSSEKGVFTELRIPDGYYIGEIGSPKLPAIKKLIEIPLGAEISIEVLDYTICEYDLSDYQIFNKIMPVQPSLSKSTDPSTVPFEFDEDEYNVNAYNEEELATVEALGTLRGLRLAQLVVAPVRYNPVEEKIKFYNNIKVQVTFHNPDIAETEYIKAATYSPYFDVITKRIFNGRDHGYPSHPDLVTYPVKYLIVAHRMFEATLEDFIEWKTQKGFEVIVGYTDVIGTTAIQIKTWVHDQYNAGTPSDPAPSFVLFVGDTGQVTSETGSSTSKVTDLYYCSVDGDMFPEMYYGRFSATTTAQLQTQIDRTLYYEKYQFANPSFLDNVTLIAGYDGSGHNPTHGQPVVNYGTDNYFNATHGFVDVYAYLTSPYDGCYDTINDGICMINYTAHGSQTSWGTPNMNQTMVNNLTNVGKYPLAIGNCCLSGDFGYTECFGETWARATDASTGDPTGAIGYIASAPSSYWHEDVYWAIGAFPTVGSGPTPPTYDETSWGAYDAPFVTDYVCQDALNFVGNLAVTEAANLSYPQHSSPLYYWQAYNLLGDPSVVVYMTQGSTNSVTFPGLLPIGSTTFSVQAEPGSYVAISMNGVLHGAALANDFGTADVLIDPFTVAGTADIIVTKPQYQPVLTTVLVATPAVVNITPSSMPINTLTDVSIDVFEEDGTTPIPDVNILITGPGVYGTTSGITNASGSCTLNFGGEYGGDTILNVIGWRTGDGYNLVEEPFAITGGLDLTNPAIWLTTDFGLQDTFGLNLPGTVLFSQDQTDCTYNLYIVAEDTTIYSSEDEITYTPTCITNVLAGIMKSGYNMYQETFTTIEVFGTVSGIVTDSDNGVAITDAEVRFYEQGSDPTEPPLFSDETDATGFYEITTEYPVEHYDIYIDKWGFDPYQELGFFLNYSANTHDIVIDPVESSMVTGHLIDDFLILGSGTLSYYRTDTGEEYASVDVSGGTYEVILPNFTYNIYVSSSQHVPYSGTLTVEGDMIINYHLGNAAIFADFEQDDGDFVSNDASGWQWGVPSGGEIFAHSGTKCWATVLDGYYGVDYADWTLDSSEFSISGSGMLTFWHYYDFEGSYTYWDGGNVSISTNGGISFEVITPLGGYTGTISALGEPGFGSSIDDWEQVEFDINGFTGDNAILRWHFASDYSANQYWGWYIDDVLYGDPTTSYPIPIYDNDPDHQIVTTKLQQNFPNPVLNSTTISFMMPMNVSKAELKIYNIKGQLVQSFIPDISTGPLHELQWDGKDMTEKPVANGIYFYRLTTNNKEIIRKMILIR

SEQ ID NO: 267 - protein, 1175 aa, unclassified Cloacimonetes
MLSKVYENLFRCYMKKSLLVVIILLFAVSLIHAKDMFSFSSKGNGVEIQFENNNDLSSEVENAFTTIALPSEDIEIIIHDFTLLEYSEKGEFLKNVEKIDNSRIEKVNSFTMRELRGHTLQIKTQIYNEKEHTYSKIEKLNFEIVPRNVQSAPQYLSKAFYKLYPQLVDNFDESYLAGLPVQPSKMLIICHQLLENYIQDFIDWKQAKGIECTVATLLETGTTANEIKAYIQQVYDTSDVPPDYVLLIGDMDDYFAVPSFYYGAENDVTDHPYTMLTGSDYFPELIIGRMSIDEINQLWTIINKVISYEKTPYLANPEWLKEALLVAGNYSNTPPTPSTPVKVSRWLRDKMLNYGFTQVDTVFYPPTYPGTSEIISRINDGIGFLNYRGWGDANGWHYPEFHVDNMSSLSNGLLMPVVTSFVCNTGDFANTSADPCFGEAILQLGTPTAPQGGVVFIGPSDLHTSTKLNNSIFSGFYYGLLDEGIYDFGSAVLRGKIELYHNFPLQQAASDQVEFYFHVYNILGDPTLTMWTTIPEDIDCSIPASVTVGTNHLDISCTNLDEGIVTAKKADEFYEVAMLENGHAIIPFASESTGEIEIVITSPNFIAFVDTIAVLEQAIDVGLYEYEALSAVEAGTTLDVDLTLKNFGTSTASNVSATLSSSSSMVSVITPTKNFGDIAPDATSQQTYEIEIDAVCPDNEVLEFTLNISTGATAKFSLIASSLLFDVIDVTVNSPSGWLEPGENDEIQVTIENIGSLDGVSIQGMLAALSDAAEVTSADYDFGSVLITETSAGTFDVSIESNCFIGRNIPFELTLADESDRITHVYFSLEVGPVDNTAPTGPDAFGYYAYDSYDVDYDEVPVYNWIEIDPDEGGLGQVIFMADDESSTIPLPFTFTYYNEAFDEITVCSNGWISFITNDWTNFRNWDIPSALGPYGQVCAYWDDLIGEAYTIVDTTYHHDMRICHYYDAAENKFIVEWNKCFNRFDDVSVEKFELILLDPAYYPTTSGNGEMQCNYHTINNPDATSNYSTVGIENLTQSDGILYTFADIYPASATLLENELAIKYTTDPPDPYYAIDEEPAGMKSTLTIYPQPSSGSTVISYYAKDASATNLTAGIYNIKGQLVKEIIFDSSDNKCRQYTWNCLDDHNKKSPNGIYFVKIHENNSTEIGKIIILR

SEQ ID NO: 268 - protein, 1137 aa, Porphyromonas gingivalis
MSKGPFMKKMAILLAIFLLLSFSLSAELIAEGNSKNSVSLLIDNESETILEYRISEFEKNMITIEGEEWYQIRLPKEGITQDKGYPELPVFNRSIIIPDQALMAIEVFDLEFKDYPIKVAPSKGVITRDINPATIPYTFDNVYQENSFYPQKMVALSEPYILRDFRGITVLTTPFAYNPVTGTLRVYTSYKVKVYNQGNDTVNTFNRSRTSVSRSFCPLYENHFLNWNSYRYTPVDDSYGKLLVICHSSFLTQIAPYVNWKRQKGIDTELVEFSTIGTTANQLKAYIQNRYNADNSITFVQLVGDAPQIPTLSYSGGGSDPSFSLVAGSDNYPDIFIGRFSAQTTAEVTAQVNKTIQYEKDLNTSATWLSKAMGIASAEGSGGQGDNGESDITHMNLIRTKLLNYGYTSVDQIYDPGASASTVTTNVNTGRGFINYVGHGSDTTWGTTGFSNTNASALTNGNKVPFIMDVACVNGNFVSITCFAEAWMRNANGGAVGIYASSINQSWASPMRAQDEVTDLLISETHTTLGGLYYNGSCKMMDVYGSDGVNMFKTWHIFGDASLQVRSKTPLAMTVSHPTSITSGINNITISTGVANALVAITYNNTIYGKAVTNSSGSAIVNISNPPSGEITYTVTVTAFNRVTYTGSLQQVNVPPDQPRFVAEWEPAQGSIIRYPFGLPYSLIADLANNCLLYVIVSSSLQSTCNSALVSNGVNMANVRYIVTDNDTYWIRDYGPWTIMNRENNLQLIDFTYNRPRPYDDAVPLAIANFLGVDLYKMNITHTGGNIMTDGQGKAMSTDLVLTENTSLSQNDINIMFNNYLGVTDYQLYPDPNNTYINHIDCWAKLLDVDKVIIRSVPTNHSQYNAIEAVVNQWETKLSSYGTPYKIYRVYTPNDEPYTNSFILNKHIYVPLMGTANDASAILAYQNAMPGYIVTGYLYSSFESTDAIHCRVNTIFDDKMISLKHIPPVLSSVAQSLTLSANITHTNALSPSATYISWKIGKNGIWQNSNLTLQSDGNWVTNLTAPVIGDTLFYWFSATDVTNRNVTLPLCAEYDPFMLIGVYVPAISQPQVQLQVQDANVRISWNAIPYANNYVIYSANSPDDVFLPVGSTSATFWETPLNTEKKFFKVVAQRVVR

SEQ ID NO: 269 - protein, 628 aa, Porphyromonas gingivalis
DIEDFVDWKNQRGLRTEVKVAEDIASPVTANAIQQFVKQEYEKEGNDLTYVLLIGDHKDIPAKITPGIKSDQVYGQIVGNDHYNEVFIGRFSCESKEDLKTQIDRTIHYERNITTEDKWLGQALCIASAEGGPSADNGESDIQHENVIANLLTQYGYTKIIKCYDPGVTPKNIIDAFNGGISLVNYTGHGSETAWGTSHFGTTHVKQLTNSNQLPFIFDVACVNGDFLYNVPCFAEALMRAQKDGKPTGTVAIIASTINQYWAPPMRGQDEMNEILCEKHPNNIKRTFGGVTMNGMFAMVEKYKKDGENMLDTWTVFGDPSLLVRTLVPTKMQVTAPAQINLTDASVNVSCDYNGAIATISANGKMFGSAVVENGTATINLTGLTNESTLTLTVVGYNKETVIKTINTNGEPNPYQPVSNLTATTQGQKVTLKWDAPSTKTNATTNTARSVDGIRELVLLSVSDAPELLRSGQAEIVLEAHDVWNDGSGYQILLDADHDQYGQVIPSDTHTLWPNCSVPANLFAPFEYTVPENADPSCSPTNMIMDGTASVNIPAGTYDFAIAAPQANAKIWIAGQGPTKEDDYVFEAGKKYHFLMKKMGSGDGTELTISEGGGSDYTYTVYRDGTKI

SEQ ID NO: 270 - protein, 225 aa, Porphyromonas gingivalis
DFVDWKNQRGLRTEVKVAEDIASPVTANAIQQFVKQEYEKEGNDLTYVLLVGDHKDIPAKITPGIKSDQVYGQIVGNDHYNEVFIGRFSCESKEDLKTQIDRTIHYERNITTEDKWLGQALCIASAEGGPSADNGESDIQHENVIANLLTQYGYTKIIKCYDPGVTPKNIIDAFNGGISLVNYTGHGSETAWGTSHFGTTHVKQLTNSNQLPFIFDVACVNGDFL

SEQ ID NO: 271 - protein, 717 aa, Porphyromonas gingivalis
MRKLLLLIAASLLGVGLYAQSAKIKLDAPTTRTTCTNNSFKQFDASFSFNEVELTKVETKGGTFASVSIPGAFPTGEVGSPEVPAVRKLIAVPVGATPVVRVKSFTEQVYSLNQYGSEKLMPHQPSMSKSDDPEKVPFVYNAAAYARKGFVGQELTQVEMLGTMRGVRIAALTINPVQYDVVANQLKVRNNIEIEVSFQGADEVATQRLYDASFSPYFETAYKQLFNRDVYTDHGDLYNTPVRMLVVAGAKFKEALKPWLTWKAQKGFYLDVHYTDEAEVGTTNASIKAFIHKKYNDGLAASAAPVFLALVGDTDVISGEKGKKTKKVTDLYYSAVDGDYFPEMYTFRMSASSPEELTNIIDKVLMYEKATMPDKSYLEKVLLIAGADYSWNSEVGQPTIKYGMQYYYNQEHGYTDVYNYLKAPYTGCYSHLNTGVSFANYTAHGSETAWADPLLTTSQLKALTNKDKYFLAIGNCCITAQFDYVQPCFGEVITRVKEKGAYAYIGSSPNSYWGEDYYWSVGANAVFGVQPTFEGTSMGSYDATFLEDSYNTVNSIMWAGNLAATHAGNIGNITHIGAHYYWEAYHVLGDGSVMPYRAMPKTNTYTLPASLPQNQASYSIQASAGSYVAISKDGVLYGTGVANASGVATVNMTKQITENGNYDVVITRSNYLPVIKQIQAGEPSPYQPVSNLTATTQGQKVTLKWDAPSAKKAEASR

SEQ ID NO: 272 - protein, 727 aa, Porphyromonas gingivalis
MRKLLLLIAASLLGVGLYAQSAKIKLDAPTTRTTCTNNSFKQFDASFSFNEVELTKVETKGGTFASVSIPGAFPTGEVGSPEVPAVRKLIAVPVGATPVVRVKSFTEQVYSLNQYGSEKLMPHQPSMSKSDDPEKVPFVYNAAAYARKGFVGQELTQVEMLGTMRGVRIAALTINPVQYDVVANQLKVRNNIEIEVSFQGADEVATQRLYDASFSPYFETAYKQLFNRDVYIDHGDLYNTPVRMLVVAGAKFKDALKPWLTWKAQKGFYLDVHYTDEAEVGTTNASIKAFIHKKYNDGLAASAAPVFLALVGDTDVISGEKGKKTKKVTDLYYSAVDGDYFPEMYTFRMSASSPEELTNIIDKVLMYEKATMPDKSYLEKALLIAGADSYWNPKIGQQTIKYAVQYYYNQDHGYTDVYSYPKAPYTGCYSHLNTGVGFANYTAHGSETSWADPSLTATQVKALTNKDKYFLAIGNCCVTAQFDYPQPCFGEVMTRVKEKGAYAYIGSSPNSYWGEDYYWSVGANAVFGVQPTFEGTSMGSYDATFLEDSYNTVNSIMWAGNLAATHAENIGNVTHIGAHYYWEAYHVLGDGSVMPYRAMPKTNTYTLPASLPQNQASYSIQASAGSYVAISKDGVLYGTGVANASGVATVNMTKQITENGNYDVVITRSNYLPVIKQIQAGEPSPYQPVSNLTATTQGQKVTLKWDAPSAKKAEASREVKRIGDGLF

SEQ ID NO: 273 - protein, 713 aa, Porphyromonas gingivalis
MRKLLLLIAASLLGVGLYAQSAKIKLDAPTTRTTCTNNSFKQFDASFSFNEVELTKVETKGGTFASVSIPGAFPTGEVGSPEVPAVRKLIAVPVGATPVVRVKSFTEQVYSLNQYGSEKLMPHQPSMSKSDDPEKVPFVYNAAAYARKGFVGQELTQVEMLGTMRGVRIAALTINPVQYDVVANQLKVRNNIEIEVSFQGADEVATQRLYDASFSPYFETAYKQLFNRDVYTDHGDLYNTPVRMLVVAGAKFKEALKPWLTWKAQKGFYLDVHYTDEAEVGTTNASIKAFIHKKYNDGLAASAAPVFLALVGDTDVISGEKGKKTKKVTDLYYSAVDGDYFPEMYTFRMSASSPEELTNIIDKVLMYEKATMPDKSYLEKVLLIAGADYSWNSQVGQPTIKYGMQYYYNQEHGYTDVYNYLKAPYTGCYSHLNTGVSFANYTAHGSETAWADPLLTTSQLKALTNKDKYFLAIGNCCITAQFDYVQPCFGEVITRVKEKGAYAYIGSSPNSYWGEDYYWSVGANAVFGVQPTFEGTSMGSYDATFLEDSYNTVNSIMWAGNLAATHAGNIGNITHIGAHYYWEAYHVLGDGSVMPYRAMPKTNTYTLPASLPQNQASYSIQASAGSYVAISKDGVLYGTGVANASGVATVNMTKQITENGNYDVVITRSNYLPVIKQIQAGEPSPYQPVSNLTATTQGQKVTLKWEAPSAKKA

SEQ ID NO: 274 - protein, 225 aa, Porphyromonas gingivalis
DFVDWKNQRGLRTEVKVAEDIASPVTANAIQQFVKQEYEKEGNDLTYVLLVGDHKDIPAKITPGIKSDQVYGQIVGNDHYNEVFIGRFSCESKEDLKTQIDRTIHYERNITTEDKWLGQALCIASAEGGPYADNGESDIQHENVIANLLTQYGYTKIIKCYDPGATAKKIIDAFNGGISLVNYTGHGSETAWGTSHFGTTHVKQLTNSNQLPFIFDVACVNGDFL

SEQ ID NO: 275 - protein, 726 aa, Porphyromonas gingivalis
MRKLLLLIAASLLGVGLYAQSAKIKLDAPTTRTTCTNNSFKQFDASFSFNEVELTKVETKGGTFASVSIPGAFPTGEVGSPEVPAVRKLIAVPVGATPVVRVKSFTEQVYSLNQYGSEKLMPHQPSMSKSDDPEKVPFVYNAAAYARKGFVGQELTQVEMLGTMRGVRIAALTINPVQYDVVANQLKVRNNIEIEVSFQGADEVATQRLYDASFSPYFETAYKQLFNRDVYTDHGDLYNTPVRMLVVAGAKFKEALKPWLTWKAQKGFYLDVHYTDEAEVGTTNASIKAFIHKKYNDGLAASAAPVFLALVGDTDVISGEKGKKTKKVTDLYYSAVDGDYFPEMYTFRMSASSPEELTNIIDKVLMYEKATMPDKSYLEKVLLIAGADYSWNSEVGQPTIKYGMQYYYNQEHGYTDVYNYLKAPYTGCYSHLNTGVSFANYTAHGSETAWADPLLTTSQLKALTNKDKYFLAIGNCCITAQFDYVQPCFGEVITRVKEKGAYAYIGSSPNSYWGEDYYWSVGANAVFGVQPTFEGTSMGSYDATFLEDSYNTVNSIMWAGNLAATHAGNIGNITHIGAHYYWEAYHVLGDGSVMPYRAMPKTNTYTLPASLPQNQASYSIQASAGSYVAISKDGVLYGTGVANASGVATVNMTKQITENGNYDVVITRSNYLPVIKQIQAGEPSPYQPVSNLTATTQGQKVTLKWDAPSAKKAEGSREVKRIGDGL

SEQ ID NO: 276 - protein, 727 aa, Porphyromonas gingivalis
MRKLLLLIAASLLGVGLYAQNAKIKLDAPTTRTTCTNNSFKQFDASFSFNEVELTKVETKGGTFASVSIPGAFPTGEVGSPEVPAVRKLIAVPVGATPVVRVKSFTEQVYSLNQYGSEKLMPHQPSMSKSDDPEKVPFVYNAAAYARKGFVGQELTQVEMLGTMRGVRIAALTINPVQYDVVANQLKVRNNIEIEVSFQGADEVATQRLYDASFSPYFETAYKQLFNRDVYIDHGDLYNTPVRMLVVAGAKFKDALKPWLTWKAQKGFYLDVHYTDEAEVGTTNASIKAFIHKKYNDGLAASAAPVFLALVGDTDVISGEKGKKTKKVTDLYYSAVDGDYFPEMYTFRMSASSPEELTNIIDKVLMYEKATMPDKSYLEKALLIAGADSYWNPKIGQQTIKYAVQYYYNQDHGYTDVYSYPKAPYTGCYSHLNTGVGFANYTAHGSETSWADPSLTATQVKALTNKDKYFLAIGNCCVTAQFDYPQPCFGEVMTRVKEKGAYAYIGSSPNSYWGEDYYWSVGANAVFGVQPTFEGTSMGSYDATFLEDSYNTVNSIMWAGNLAATHAENIGNVTHIGAHYYWEAYHVLGDGSVMPYRAMPKTNTYTLPASLPQNQASYSIQASAGSYVAISKDGVLYGTGVANASGVATVNMTKQITENGNYDVVITRSNYLPVIKQIQAGEPSPYQPVSNLTATTQGQKVTLKWDAPSAKKAEASREVKRIGDGLF

SEQ ID NO: 277 - protein, 314 aa, Porphyromonas gingivalis
NGRMIVIVAKKYEGDIKDFVDWKNQRGLRTEVKVAEDIASPVTANAIQQFVKQEYEKEGNDLTYVLLVGDHKDIPAKITPGIKSDQVYGQIVGNDHYNEVFIGRFSCESKEDLKTQIDRTIHYERNITTEDKWLGQALCIASAEGGPSADNGESDIQHENVIANLLTQYGYTKIIKCYDPGVTPKNIIDAFNGGISLVNYTGHGSETAWGTSHFGTTHVKQLTNSNQLPFIFDVACVNGDFLFSMPCFAEALMRAQKDGKPTGTVAIIASTINQYWAPPMRGQDEMNEILCEKHPNNIKRTFGGVTMNGMFAMV

SEQ ID NO: 278 - protein, 525 aa, Tannerella sp.
MKKAIKLFLYIILCFIPTVLSAQMLIVCAPEFADEMKPFIQWKTQKGMKVELITMDKIGSTAAELKNYVADYYKKNNNRYLLLVGDAEQIPVHFCYGITDPDPNTAYSDAEYGYISGDEYPPSVLVGRFSAKTTEDVRTQVERVIYYERDIDESATWLGNSIGIADPSSNEKGDNDETDIQHIRNINDILKDNNYTIYEISKKNDLVEQLNKGCGIVNYTGHGYTESWATTGFSVNDVNKLTNINRLPFIIAAGCQNGHFRLGTCLSEAFLRGQTQEGKPVGAIGMLGFTIQIYWNPPMLGQDEFIKILTSDNSPKILGEVINSTYKKVIEVYKDSGSDAAKQWSLFGDPSLLLRRRTPQNMNIVYDKTLPVGTSSINIDCDTDGATVALSANDKLLDVKTVTDGQASLSFPRIEQDITLYVTITAQDKVTHQGKIIVGKGSGIETNNINNSVLIYPNPSTGTITLSGISFLQEPVLAQIYSPDGQLIKETIITNNMPFSLSIAPGIYFLRIANTEINKKIIITQ

SEQ ID NO: 279 - protein, 526 aa, Tannerella sp.
MRRVRFLVCCIFLWGMSCLLHAQMLVVCAPEYIEEMKPFVTWKIQKGIPTQMVSMSEIGETYEDLRDYVKDYYQTHHNRYLLLVGDANQVPINYLPGYDVTPFTPYTDAEYGYVSGTYPPEVLVGRLSAETADDVKVQVEKIIFYEKNVDENASWLSQCVGIANPSGTDKGDNDETDIQHIRQVNSVLEQYGYTTHETSTKKELTDLLNIGCGIVNYAGHGFMSGWATSDFSISDVATLSNEGKFPVIISTGCDNGKFATGTCFAESFLRARNSVGDPIGAVGMLGFSAQVTWNPPMLGQDEMVRILTSLDIPDSRKTFGEVANEAYRKVIEKYRGSGEDAAKEWILFGDPSMMLRTRTPGKMVVSHIEAADNGITSLSVGCDKDGAVVALSEGNNLLAVQTVENGKAMLDFPAVTGDKILTVMVTAFDKVTYTGQIIIGDGSGLEVADSDASVMIYPNPSRGEIRIDGLSASSAFISIYSLDGSLIRKAEVDLGTSIPLNVEPGTYFLHLQSEGRYIVRRILVTE

SEQ ID NO: 280 - protein, 511 aa, Coprobacter fastidiosus
MSYLLHAQMLVVCAPEYIEEMKPFVTWKIQKGIPTQMVSMSEIGETYEELRDYVKDYYQTHHNRYLLLVGDANQVPINYLPGYDVTPFTPYTDAEYGYVSGTYPPEVLVGRLSAETADDVKVQVEKIIFYEKNVDENASWLSQCVGIADPLATDKGDNDETDIQHIRQVNSVLEQYGYTTHETSTKKELTDLLNIGCGIVNYAGHGFMSGWATSDFSVSDVAALSNEGKFPVIISTGCDNGKFATGTCFAESFLRARNSAGDPIGAVGMLGFSAQVTWNPPMLGQDEMVRIMTSPDIPDSRKTFGEVANEAYRKVIEKYRGSGEDAAKEWILFGDPSMMLRTRIPGRMAVSHIEAADNGITSLSVSCDKDGAVVALSEGNNLLAVQTVEKGKAMLDFPAVTGDKILTVTVTAFDKVTYMGQVVIGDGSGLEVADSDASVTIYPNPSRGEIRIDGLSASSAFISIYSLDGSLIRKAEVDPNTSIPLNVEPGTYFLHLQSDGRYIVRRILVTE

SEQ ID NO: 281 - protein, 1704 aa, Porphyromonas gingivalis
MKNLNKFVSIALCSSLLGGMAFAQQTELGRNPNVRLLESTQQSVTKVQFRMDNLKFTEVQTPKGIGQVPTYTEGVNLSEKGMPTLPILSRSLAVSDTREMKVEVVSSKFIEKKNVLIAPSKGMIMRNEDPKKIPYVYGKSYSQNKFFPGEIATLDDPFILRDVRGQVVNFAPLQYNPVTKTLRIYTEITVAVSETSEQGKNILNKKGTFAGFEDTYKRMFMNYEPGRYTPVEEKQNGRMIVIVAKKYEGDIKDFVDWKNQRGLRTEVKVAEDIASPVTANAIQQFVKQEYEKEGNDLTYVLLVGDHKDIPAKITPGIKSDQVYGQIVGNDHYNEVFIGRFSCESKEDLKTQIDRTIHYERNITTEDKWLGQALCIASAEGGPSADNGESDIQHENVIANLLTQYGYTKIIKCYDPGVTPKNIIDAFNGGISLVNYTGHGSETAWGTSHFGTTHVKQLTNSNQLPFIFDVACVNGDFLFSMPCFAEALMRAQKDGKPTGTVAIIASTINQSWASPMRGQDEMNEILCEKHPNNIKRTFGGVTMNGMFAMVEKYKKDGEKMLDTWTVFGDPSLLVRTLVPTKMQVTAPAQINLTDASVNVSCDYNGAIATISANGKMFGSAVVENGTATINLTGLTNESTLTLTVVGYNKETVIKTINTNGEPNPYQPVSNLTATTQGQKVTLKWDAPSTKTNATTNTARSVDGIRELVLLSVSDAPELLRSGQAEIVLEAHDVWNDGSGYQILLDADHDQYGQVIPSDTHTLWPNCSVPANLFAPFEYTVPENADPSCSPTNMIMDGTASVNIPAGTYDFAIAAPQANAKIWIAGQGPTKEDDYVFEAGKKYHFLMKKMGSGDGTELTISEGGGSDYTYTVYRDGTKIKEGLTATTFEEDGVATGNHEYCVEVKYTAGVSPKVCKDVTVEGSNEFAPVQNLTGSAVGQKVTLKWDAPNGTPNPNPNPNPNPGTTTLSESFENGIPASWKTIDADGDGHGWKPGNAPGIAGYNSNGCVYSESFGLGGIGVLTPDNYLITPALDLPNGGKLTFWVCAQDANYASEHYAVYASSTGNDASNFTNALLEETITAKGVRSPEAIRGRIQGTWRQKTVDLPAGTKYVAFRHFQSTDMFYIDLDEVEIKANGKRADFTETFESSTHGEAPAEWTTIDADGDGQGWLCLSSGQLDWLTAHGGTNVVASFSWNGMALNPDNYLISKDVTGATKVKYYYAVNDGFPGDHYAVMISKTGTNAGDFTVVFEETPNGINKGGARFGLSTEANGAKPQSVWIERTVDLPAGTKYVAFRHYNCSDLNYILLDDIQFTMGGSPTPTDYTYTVYRDGTKIKEGLTETTFEEDGVATGNHEYCVEVKYTAGVSPKECVNVTINPTQFNPVKNLKAQPDGGDVVLKWEAPSAKKTEGSREVKRIGDGLFVTIEPANDVRANEAKVVLAADNVWGDNTGYQFLLDADHNTFGSVIPATGPLFTGTASSNLYSANFEYLIPANADPVVTTQNIIVTGQGEVVIPGGVYDYCITNPEPASGKMWIAGDGGNQPARYDDFTFEAGKKYTFTMRRAGMGDGTDMEVEDDSPASYTYTVYRDGTKIKEGLTETTYRDAGMSAQSHEYCVEVKYAAGVSPKVCVDYIPDGVADVTAQKPYTLTVVGKTITVTCQGEAMIYDMNGRRLAAGRNTVVYTAQGGYYAVMVVVDGKSYVEKLAVK

SEQ ID NO: 282 - protein, 745 aa, Porphyromonas gingivalis
MGVGLYAQNAKIKLDAPTTRTTCTNNSFKQFDASFSFNEVELTKVETKGGTFATVSIPGAFPTGEVGSPEVPAVRKLIAVPVGATPVVRVKSFTEQVYSLNQYGSEKLMPHQPSMSKSDDPEKVPFVYNAAAYARKGFVGQELTQVEMLGTMRGVRIAALTINPVQYDVVANQLKVRNNIEIEVSFQGADEVATQRLYDASFSPYFEAAYKQLFNRDVYTDHGDLYNTPVRMLVVAGAKFKEALKPWLTWKAQKGFYLDVHYTDEAEVGTTNASIKAFIHKKYNDGLAASAAPVFLALVGDTDVISGEKGKKTKKVTDLYYSAVDGDYFPEMYTFRMSASSPEELTNIIDKVLMYEKATMPDKSYLEKALLIAGADSYWNPKIGQQTIKYAVQYYYNQDHGYTDVYSYPKAPYTGCYSHLNTGVGFANYTAHGSETSWADPSLTATQVKALTNKDKYFLAIGNCCVTAQFDYPQPCFGEVITRVKEKGAYAYIGSSPNSYWGEDYYWSVGANAVFGVQPTFEGTSMGSYDATFLEDSYNTVNSIMWAGNLAATHAGNIGNITHIGAHYYWEAYHVLGDGSVMPYRAMPKTNTYTLPASLPQNQASYSIQASAGSYVAISKDGVLYGTGVANASGVATVNMTKQITENGNYDVVITRSNYLPVIKQIQAGEPSPYQPVSNLTATTQGQKVTLKWDAPSAKKAEASREVKRIGDGLFVTIEPANDVRANEAKVVLAADNVWGDNTGY

SEQ ID NO: 283 - protein, 1293 aa, Cloacimonetes bacterium JGI OTU-1
MKKFFILISLLILASTLFAGQQTWVPLNKDAEQDVVVNVLTSNDNLIEIEYAVNGFYKEEVLIDGKAYSKIILPHEGLFLDRGYPELPHINRSVLIPPRSHMEITIVHSDFVEFKNIDVMPSKGSFSREIDPEDVPYTFDAMYHEDAWYPEEIVFARDPYIMRDARGMVIQIQPIQYNPVQHKLRVYTNISVQVTENGYSDVNTKDVGLFEKESVVASFLEIYKTQFINFEQAAQNNRHTPTPAVGKMLIITYDDFADEMQPLYEWKNKKGIPTQMVNVSTLGNNYTTIKNYIQNLYDTWNLAFILLVGDAPQVTPYENNKDPLYACLEGGDLYPDAFVGRFSAESSAHVETQVDRVLYYESNPLISGDWMHKGTGVASAQGSGIGYNGWADYVMMNIIRDSLLAWNYTHVDQIYDPSGTASDVSNAINNGRSLVNYCGHGSTTSWGTTGFSVSNINALTNDYMYPSVICVACLNGNFVSSTCFAEAWARATNSTTGIPTGAIGVYASVISQDWQPPMIAEYHANMFLVNEKVTTLGNYFFSGAMQMMDENFSGGTNEFKYWTVFGDPSVKLRTNTPAALTVNHNPIIPLGSTTYDVEVVGVENALVGLYMDGTLYGYGYTDETGLVTVNLDVPLVNPGQMTLTVTAYNTIPYITLLDAIVPVQVDITPDNINVNQLTDVTVTVMDSDGINPEIGVNVWAEGLDFTSDIIVTDTNGEAVLSINFQFGPTLQICGQRPGDDYLLFNEALIINALSLTDPNIDVTTTFGLYDTLAMNLEATINQYCTDNGTMLWAKLNNNGYTNTLSNSLLMTPDELGIVRAIISKTGYDLYEEDFPVIVAFGTVSGTLTDSDNGSAISSAEVRFFEEGAVPDDDPLFTAVTNSSGFYNVTSDQAVDHYDIYINKWGFNPYQELSYFLGYGANTHDMQLDPVESGFISGNVYDDFIILGNATLSYCRSDNGEEYASVQTAGGGYEVSLPNFTYTLYVTAEGHVPYIGTLTVNGDAQYDYHLGYADLYSDFEANDGNFVSSYAGGWQWGEPTAGGITAHSGINLWATVLGGYYGTNYADWTLDSPEFTVPADATLYFWHYYDFEGTTTLWDGGNVTISTNGGTAYSLITPEGGYTGNISALSAQGFGGQLDEWEQVEFDLSSYAGSTANMRWNFGSDTSVNSYYGWYIDDVLIGDPSTSYEIPAVSVDDPHPVQTVSLHQNFPNPVQNSTTFSFALPQNIQKVELSIYNIKGQLVKTFSPNIDDGPHFEIEWNGKDSSNKSVASGVYFYRLTTGQKEITKKLLLLQ

SEQ ID NO: 284 - protein, 793 aa, unclassified Cloacimonetes
YSYVVGNCCLTSKFNDSICFAEAWLRATNKGAIIYIGGTNSTYWDEDYWWGVGYKPPVVGTGSPFVAGHTGAYDALFHDHNEPFADWAGNAGSNVVMGNMAVVQSNSSRINYYWEIYSIMGDPSLVPYLGIPAQNAYTPPAQMFLGFNSMDIQTDPYSYVALSMNNESHGVGLADASGNLTLNYTPFTEPGIAKLVITRSLRKPLIANIEIIPNEGPYLTVGPLELNDGNNNIAEAGDNINISLQFNNVGIETASNLTATLTCDSPYILLNNATVQLPDIASGNSINQTNAFQISILPDVPDQHLAGFNITVSDGEDTWVTQRSLTINAPNVVFGNHTLFDSNSDGIYQPGETVTISLSISNTGHMNVDGGSLAIVLNSPYAALDNYNFIIPPLTAGNGIPIVLHLFISQDCPDDEVIPIGFAMNAGIQLLNHSIMIPVGIIGESFESGDFAAFPWVNNSTNPWTIISGTSNAHFGNYAAKSGAIGNNGSTTLQITMEVSSAGNISFWRKVSSEANYDWLKFYIDNNETGSWSGEIGWSEVSYPVTAGSHIFKWTYSKDTGIVSGSDCAWLDDIRFPGMGVLETAIFYTTTTQIEFTNVLPNTTVSIDFALRNLGNLAMQGIITCPPDFELSQYGNALPANYAYQIEAGQTVFYTLSYIAGNSVSELQTNMQITTNDPHHPVVIIPVNLFPLANDDNVNIPYVTALHKNYPNPFNPETTIHYSLSESGPVKIEVYNIKGQLVRNLVNERKTAGNYTVIWNGKDEQGKNVSSGIYFYRMQTKNYSSTQKMMLMK

SEQ ID NO: 285 - protein, 1145 aa, Proteobacteria bacterium JGI 0000113-E04
MRFLHIFFLFIFFSFECFSDEIVVSKGENSFIVKEKTSAGFKVYNHLNVINSNIIKTEDGDFTKLTVPYYSTNSDIGAPELPSLKKLINIPAGANISVNVINKVSKIISLDDFGIQNFILPNQPSISKSKSAEEIEFFYKKDFYNNDVFTNDELVSFEILGSMREVQLARIIISPISYNPVANEIEVVTNLEVEVNFSVKNKAINNPRYYSPEFEHLYKKCINYLPPIPEDIITTYPVKYVIVSDPLFQTALQPLVEWKTKKGFNVIEAYTNDPNVGTTTNSIKAYVKNLYDNATLTDPAPTYLLLVGDLMQIPSFSGNSGSHITDLFYCEFDGSGDFYPEMYYGRFSATTVAEVEIQVAKTLTHEKYLFADPSFLDGIVLVAGVDGAYAPTYGNGQINYATDNYFNIAHNLTIHNYLYGSGTPITSDMPQASSNIISNISEGVGLANYTAHCGPSGWGDPSFNTSDVYTLQNNGEYGLIISNCCLPNKFDEPICFGEALLREDNKGALGHIGASNNTYWDEDYWWSVGNTSNITSNPTYSGTGLGAYDSWMHENGEHEDDWFITQAQILHAGNLAVTEAGGAEDYYWEIYHLMGDPSLMPYIGVPTLLTVSHNNIIPIGATSLAVNSEENSYVALSMNGILLDAKLCDASGVVNLTFNPISNAGTLDIVVTKQFKQPYINTIQSISPNGPYVTVTNNLISDINGNNNSLADYSEVVNLDVDLFNLGGGNSQNLNLVLSTNDQYITIVDSIHSISTITSNQTITTTNAFSFQVADYVPDQHIANFILTITDALSNVWNSSINITLNSPILNHLNFSVNDLVLGNGNGKLDAGENLDLIVEVQNLGHADAYTLTATLSSLSSYITINNINASLPSLNTTQSQNVVFNISVDPNTPVGTNVIFPFDLTDQIYTHQTDFTENVGIINEDYETGDFTNYSWIQGTYPWTVDANQIYEGVYSSRSADNLPHNQESELSVEVDVLTAGDISFYKFVSSEFNFDFLKFKINGNKVGEWSGEDSVWSFVSFPVVNTGLHTFKWEYDKDASWSDGDDCAWIDYIVFPPIVITQTSLDNNFVDIKIFPNPTMGIFNIDFGIHKNKSFEITDVFGKRLDYIENVNHTNEFDMSDYAPGTYLINIMPDNLIFQIIKQ

SEQ ID NO: 286 - protein, 771 aa, Cloacimonetes bacterium JGI 0000039-M09
AWLRATNKGAIIYIGGTNSTYWDEDYWWGVGYKPPVVGTGSPFVAGHTGAYDALFHDHNEPFADWAGNAGSNVVMGNMAVVQSNSSRINYYWEIYSIMGDPSLVPYLGIPAQNAYTPPAQMFLGFNSMDIQTDPYSYVALSMNNESHGVGLADASGNLTLNYTPFTEPGIAKLVITRSLRKPLIANIEIIPNEGPYLTVGPLELNDGNNNIAEAGDNINISLQFNNVGIETASNLTATLTCDSPYILLNNATVQLPDIASGNSINQTNAFQISILPDVPDQHLAGFNITVSDGEDTWVTQRSLTINAPNVVFGNHTLFDSNSDGIYQPGETVTISLSISNTGHMNVDGGSLAIVLNSPYAALDNYNFIIPPLTAGNGIPIVLHLFISQDCPDDEVIPIGFAMNAGIQLLNHSIMIPVGIIGESFESGDFAAFPWVNNSTNPWTIISGTSNAHFGNYAAKSGAIGNNGSTTLQITMEVSSAGNISFWRKVSSEANYDWLKFYIDNNETGSWSGEIGWSEVSYPVTAGSHIFKWTYSKDTGIVSGSDCAWLDDIRFPGMGVLETAIFYTTTTQIEFTNVLPNTTVSIDFALRNLGNLAMQGIITCPPDFELSQYGNALPANYAYQIEAGQTVFYTLSYIAGNSVSELQTNMQITTNDPHHPVVIIPVNLFPLANDDNVNIPYVTALHKNYPNPFNPETTIHYSLSESGPVKIEVYNIKGQLVRNLVNERKTAGNYTVIWNGKDEQGKNVSSGIYFYRMQTKNYSSTQKMMLMK

SEQ ID NO: 287 - protein, 1260 aa, unclassified Cloacimonetes
MKNLKRVMFLLLLPIFTLTAMFASNGYEVYFHQTSSTEFELNYFLDDYRISETIKNGITYSQIDFEGKVVTTDKGYAELPFIHASVQLSDDRNVSLEITSTDYVDYRLDYPLLPSRGTIYRNQDPSQILYEIAEESIVDEFYPGDIAQATEPFILRDIRGTNVYVYPFQYNSQQNILRVYTYVTVKLSEDNTPAINPFPSQTRKMLRETDSMYRTIFINYDVSRFDHEIGDFGSILVIRTPRDADAIAPYIQWKREKGYTVYEEEVATGTNVASLVSTQYNANNDILYVQLVGDWADIQGPTSGSSPTDPNLGCVVGGDYYPDLVVGRFCANNTTHVTTQVDKTITYERDPEIVGTWYEAATGIASNQGPGDDGELDYEHIQNIYDNKLDPFTYESHTPIYDPSANATMVANALNTGTSVINYCGHGSMTSWGSSGFGNSHISSLTNGDMLPFIISVACNNGEFQSGECFAEAWLHKEDGGAIGMYASTIGQSWDPPMRGQDYFNDLLIGGYDYSLYTGQNGITTDVQKQTFGSACFNGSILMTVEEPGGGQSMMETWTVFGDAALDMRTAPPSDLVLSTNVVLMGIDFTTVVTTSGVPVEGALVCLSQDGNYFSGVTDEYGNVTISHTLIAGDAKMVVTAFNTETIYDDITVIPPGGAYVIFNNYNIDDSAGNGNGIVEHGEQISFLVGLKNVGSEEATGIDAIISSTNQYVTIINDFSNYNNILPDSVEYGFTPFQIQIEPFCPDNEQLVFHLVINSGSDAWEYDFSITSYAPILELVNFLIEDGNGDGRLEPGESGSLQINLINNGEGLAENITGLLYSDDEYITLNNNSSQISYLATGQISDFYDMFTFTVSADCPAIHNLRLNLLLNEQLGYYNVLQLDVSVGFYDNVEYGVNEWTHSALNGGQDHWHQSTLRYYSDVHSWKMGSTGTGSYANNLLCALETPEIELTGDTYLTFYHWISAETSSSYPGYCYDGGLVEIYHSNQWSQIFPEGGYPFLTRGDNNPPFASDTPVFSGSIEWERAFFNLVDYDGIVKFRFVFGSDGASTEEGWYIDDIAIVEPNVFLESPANLYAENSNVGEIELNWEQPSSQPVSYNIYRRNNPNDPYEFLTNTSEIFYLDTGLSYGIYYYVVTAVYEEGESSFSNPAQAYSSSVGSDGNIVQSVCKVELMNNYPNPFNPITTISFSTSENTGNTELIIYNIKGQKVKILKNEKLDAGYHSVVWDGKDDNGKQVSSGVYFYKMKLDNYTSVRKMLLMK

SEQ ID NO: 288 - protein, 1046 aa, Porphyromonas gingivalis
RHTPTPAVGKMLIITYDDFADEMQPLYEWKNKKGIPTQMVNVSTIGNNYTSIKNYIQNLYNTDQLTFILLVGDAAQVQPYGTNKDPLYACLEGGDYYPDAFIGRFSAETGAHVETQVDRVLYYEADPFITGDWMHKGTGVASNLGPGYNGWDDNEMMDIIRDSLLTWNYTEVDQIYDPSCSALDVSNAINAGRGIVNYCGHGSTTSWGTTGFSNTHINQLTNDNMWPFIICVACYNGNFTGTTCFAEAWLRATNNTSGTPTGAIGVYASVISQDWTPPMIAEYHSNMFLLHEQVTTLGNYYFSGSMQMMDENTGGQNEFQYWTVFGDPSLKLRTDALTSMTVNHNPIIPLGSTTYEVEVVGIENALIGLYMEGTLYGYGYTDNTGHVTVNLDVPLVNPGQMALTVTAYNTIPYTTLLDAIVPVQVDITPDNINVNQATNVTVTVMDSDGINPEIGVNVWAEGLDYTSDIEVTDTNGEAILSINYQFGPTLQICGQRPDEDYLLFNEALVVNALSLIDPNIDVTTTFGLYDTLAMNMEASINQYCTNDETTLWAKLNNDDYTSTSNNSLLMTPDELGKVHTIISKSGYDLYKEDFPVIVAFGTVSGILTDSDNGSAISNAQVRFYEEGAVPNDDPLFTATTNSSGLYNVVSEQAVDHYDIYIDKWGFNPYQELSYFLGYGANTHDMQLDPVESGNVSGAVYDYFMYIGSGTIHYYRQDNGEEYAAVDISNGTYSVSLPHFNYYVYVSAPAHVPYSGTLLVNGDMVINYHLGYAALFDDAEDGMTQWISADWQLTDETCVSPTHSFTDSPGGSYPSSTTAIMQLTDPISLGSMKGSANLHFNAKWDIESNWDYAQVQASTDGTTWTALEGEYTEPGIGTFQPSGEPVYDGTQADWVAETSDLSDFAGEDQVYIRFLMASDGNVEEDGIHVDDILIGDPNSSYEIPVVTVNDPHPVHVVSLYQNFPNPVRNSTTFSFALPQDIQKAELSIYNLKGQLVKTFTPNIDEGPHFEIQWNGKDSFNKLVASGVYFYRLTTDRKEITKKLLILQ

SEQ ID NO: 289 - protein, 1302 aa, Cloacimonetes bacterium JGI OTU-4
MGYRPLKSQYFTVFGFILAYIICRGSKIYKDKNNIKGEVMKKISFILLLVFTTAILVAASGTIKLQDNPAKVQLLEKSDTGLSIAYAVDELQFREINTKEGIFTELNALNYTTTNVTGLPALPLMRQLISVPLGANVTANIISSSTKVINLDEQGVLYPLMPRQESVSKSANLEQLPFEVNRDFYNANMWTDNPSITVTEIGMMRGTRIFAVDFVPIKYNPVLKKIEVIYQAEVKVAFSGANFIATNELQAKTYSPAFEGVFAQTLINYNAPKVSFLRYPIGYVIILPDNFIAPMQPFIDWKKQEGYNVIVAPTSITGTTTTSIKAYMQNLWNSATTENPAPSYLLIVGDVAQVPTNNGNTGSHPTDLTYVRLQGTDYMPEMYFGRFSATSVAEVTNQVNKTLMHEQYTMPSDAYLSEVVMIAGVDSYYSTTHANGQINYGTNNYFNPAHNITSHTYLYPASGSSASAIVQNASNGMGYINYTAHGDVTEWYNPNFSISNINSLQNTNKYSYVVGNCCLTSKFDNPICFAEAWLRATNKGAIIYIGGTNSTYWDEDYWWGVGYKPPVVGTGSPFVAGRTGAYDALFHDHNEPFADWAGNAGSNVVMGNMAVVQSNSSRINYYWEIYSIMGDPSLVPYLGIPAQNAYTPPAQMFLGFNSMDIQTDPYSYVALSMNNELHGVGLADASGNLTLNYTPFTEPGIAKLVITRSLRKPLIANIEIIPNEGPYVTVGPLELNDGNNNIAEAGDNINISLQFNNVGIETASNLTATLTCDSPYILLNNATVQLPDIASGNSINQTNAFQISILPDVPDQHLAGFNITVSDGEDTWVTQRSLTINAPNVVFGNHTLFDSNSDGIYQPGETVTISLSISNTGHMNVDGGSLAIVLNSPYAALDNYNFIIPPLTAGNGIPIVLHLFISQDCPNDEVIPIGFAMNAGIQLLNHSIMIPVGIIGESFESGDFTAFPWVNNSTNPWTIISGTSNAHFGNYAAKSGAIGNNGSTTLQITMEVSSAGNISFWRKVSSEANYDWLKFYIDNNETGSWSGEIGWSEVSYPVTAGSHIFKWTYSKDVGSVSGSDCAWLDDIRFPGMGVLETAIFYTTTTQIEFTNVLPNTTVSVDFALRNLGNLAMQGIITCPPDFELSQYGNALPANYTYQIEAGQTVLYTLSYIAGNSVSEIQTNMQITTNDPHHPVVIIPVNLYPLANDDNVNIPYVTALHKNYPNPFNPETTIHYSLSEAGPVKIEVYNIKGQLVRNLVNERKTAGNYTVIWNGKDEQGKNVSSGIYFYRMQTKNYSSTKKMMLMK

SEQ ID NO: 290 - protein, 981 aa, Marinimicrobia bacterium SCGC AAA003-L08
MVVTLLILLSLSFASEWNGIYSSNPASTIISLEDVSESTTTIKISLDGYYSNDIEIENDIFTKISAEGGTSILKEGFPDLPQFTTSLIIPDEASMSIRVVDQEYIEIEDINVIPSKGNLSRLVNPADIDYVFSGAYSKDLFYPGALAYLRDPYILRDYRGQTVVFRPFQYNPESKILRVYTSLTIEVYEDEKSPQNIKHRRNIELKEKINREFQSIYDSHFINNTNTNNRFEYLEDRGNMLIISYGDFIDEMAPFVEWKNQMGVPTEIVNVSSIGSNSNSIKSYIEEYYFENGLTFLLLVGDINQIPSPSLSGSASDPSYGFIEGGTNDYYAEVIVGRFSANNPGEVTTQVDRSIEYEKYPQDNAAWYSKALGVASNQGPGMNGYTDDDFNEWMWDTILSNFTYDNYQGIYDPNGTDSQGTTAINNGVSIINYTGHGSISSWGNGASLSSSQINSLTNNNKLPFVITVGCNVGEFNSSTECFSEAWLRATNNGEPTGAIAHFGSTISQSWEPPMHGQWAMNKILTESYENNITRSIGGITTNGCMHMNDAQGSSGENETKYWTLFGDPSLWLRTDQSALLSIYHDNTIMIGQSEFIVDTGIDDALVSFSKNGELIDSKFSVGGITVMDLGSATNQPGDLDLIVTAFNSTPYIASISVMSTDGPYLVMDDYELSSTDILAGSSLSVSLTFQNIGNDDASDVSIALSSLSDYITINNDSDYISYLGSGSSATVGPFTFNVSSNAPFGHQFSLDFDFGTTDDSWSSNIDLSVGELVESFESADFSYLPWEFDGESDWSIDFLNASSGVYSARSGVLTDAEAESNITSDLSLSITTVEDGLISFAKKVSCEDVGSSSGNYYDYLAFYIDGVEQDKWAGESAWSTVSFAVSAGNHDLMWRFNKDQGVTSGDDAVWIDQIVFPPCDNIAGTLGDLNSDGAINVLDVITLVNMILGNSEPDYSSGDMNSDGALDVLDIVLIVNIILSN

SEQ ID NO: 291 - protein, 1324 aa, Marinimicrobia bacterium SCGC AAA003-E22
MKKIVLVGLLITGLFAGIKADYAKVISSDIQTTVIEFNTENFNLVPVSTPEGIMHLVKLENGASFLKKGAPDLHKISRSIIIPDNADMGIEILSSEFTDYNNISIAPSKGNLSRLINPEDISYEFGAEYSKDSFFPSTLAELQNPYILRSLRGQAVDFHPIQYNPIQKVLRVYSKITVKVSSSGDGGGNMLSRKAGKQLIAREYKNIYNEHFINFRDDTRFEYLEDHGNMLIISHGAFMSTMQPLVDWKNKKGIPTEMIDVAEIGSSSGSIENFVDNYYEENGLTFLLLVGDVAQIPSPSVGGSASDPSYGFINGNDSYAEVIVGRFSGQSPPQIATQVERSINYEQSPQEGADWYDNALGIASNQGPGFGGYTDDAFNDFMWETVISGFTYDSYEDIYDGSGGTLSQGINAINNGVSLINYTGHGSISSWGNGAPLSTSNVNSLTNDNLLPFVITVGCNVGEFNSTNECFCEAWLRATNNGEPTGAIAHYGSTISQSWEPPMHGQYGMNLILTESYENQITRSIGGITTNGCMYMNDAQGSSGVNETNYWTLFGDPSLEIRTDQPALLNVSHDGAIVVGQSELVVNIGVDNALVAISKDNELLAYGYSVNGSAIINLENTDLLPGDYDLVVTSFNAFPYEATISVITPEGPYVTLDSYEIVNEGWNSNGMAEFDETITLVLNANNVGVDDAHNVSGFISIDDPYISLGNNTVVFGDITAGGSSSSGGIIFTIAHNVPDGHSAGFAILFSGDEGQWEGNFNVTIHAPVLTVSNPSFTDAGGDGVWDAGEEITVVLLLNNEGSADHMMYPGVGLTENSPDAQIPDDGEFFWLYGIAAEQSVPVEFSVTASEEANMGTEVTFTAYATEMNCEENCIESEPFSFTFTIGLPIDDSLHEPLNLIAETGENSIELSWDEPFTCPDGQFADCVGQCIDDWYTAWVGDGICDDGDYGVWFYCEEFDFDGGDCGGRNENTGNNDIEKIYPTHINTDFSNSTYTRSDSREVEGYFVYRDGSYLTYTEDQAYSDESVSFNGAEYCYHITAVYEEGQSEPSNTACAIAVGEPGMMGDLNGDDNLNILDIIIMANMALGSQEPDFSLADLNDDGDINILDIITLVNMILGNRTIDTSNYLGTDAIIYISDNSVSLSANGNIAGYQMTVKADGIELNTTIPLTIEINQIQDEYVIIAYGLAGETLTGEQMQLFTASAGFEITSVIVANVLGDAMGTDLTKAALPETFELSQNFPNPFNPSTEIKFTVGKDELVSLNIYDIQGRLVSSLIDNYFYSAGSYTMNWDGKNQSGTQVPSGMYLYKLESSNHIITRKMVLMK

SEQ ID NO: 292 - protein, 1100 aa, Marinimicrobia bacterium SCGC AAA003-E22
ETEFNLQQVSPSVLNVSIITGDIVTFSAMTNEGEFTRLSLPNFHLSRDVGEPELPEIHSLIEIPQDALPHIEIVSNNYRDYSLIDLGIENLIYPAQPSLSKSQNPDDIPFAINSNVYLKNTLLEKELVSVDIKGQLRAIRIANLNIRLVDYNPAEGIIRVYTSLEINIHMNGADYAKTEEIKETYHSPYFEAVYNQIPNYDSSIRTDDMIGDPVTYVIVANSSFEGYLDEFIEWKTQKGYHVIVGYTGDIGSSALAIKNYIHNLYNNPEDGVMPPSFVLLVGDTAQLPASYSSGGHVSDNDYGDVSGDMMPEILYGRFSAQTPMHLQSQIDKTLEYEKYEMADPSFLGEVVMISGVDASYAPTYGNGQINYGTDYYFNNDHGIYSNTYLYPLSGSSGSQIKSDVSSGAAYVNYTAHGYEQGWADPSFTNSDVNNLTNNGKYPLMVGNCCLTNAFDTGECFGEALLRAQNKGAVGYIGGSDVTYWNEDYWWGVGNGNITSNPSYSSTGPGAYDCTFNDNNEENWAVVNSTLMVAGNLGVVEAGGMVDYYWEIYHLMGDPSLSTYFGVPSENNLTHTEFLPVGSTSISISGEPYTYVGITHNGNLLGSGQIGPFGNIELSLSGATIPGTAQIVGTCQNHQPYFGEILIASPEGPYVMVESSSFTSGNGSNDEDEIIQFCETVNLSLNLENVGNDDATGVEVNLSIDDPYINITMGSITVFSLAADNSYNTEGFEFEVNANVPNEYDFEISCTIAANGETWESSLNFTAYAPVIEVSSVLGSLDPGVSSNLEVHLLNTGGADIHSPMVSVVGDSYITVNESSFTNAYVWDNGDEINNEEILTLSVSVSPSTPIGHIAEFTVTVNSNQPPTTDYEENVTFTIPVGQVIANFEAGLSSLDWNLSCSGLGCANWDVDNLESYTGSSSAQSGNIGNSQSSDMSITLDITADGEIDFYYRVSAEYSSSGSYFYDGLEFYIDNTLKGQYQSTTGGGSPWTQVSYDVTEGEHTFRWSYVKDGAGGSTDCDNTDCEDAAWVDDITFPPAYIESDGVLGDLNGDGTINILDVIIMVNIILGVEPESALADVNGDGVVNILDIVQEINLILTP

SEQ ID NO: 293 - protein, 461 aa, Porphyromonas gingivalis
DVYTDHGDLYNTPVRMLVVAGAKFKEALKPWLTWKAQKGFYLDVHYTDEAEVGTTNASIKAFIHKKYNDGLAASAAPVFLALVGDTDVISGEKGKKTKKVTDLYYSAVDGDYFPEMYTFRMSASSPEELTNIIDKVLMYEKATMPDKSYLEKVLLIAGADYSWNSQVGQPTIKYGMQYYYNQEHGYTDVYNYLKAPYTGCYSHLNTGVSFANYTAHGSETAWADPLLTTSQLKALTNKDKYFLAIGNCCITAQFDYVQPCFGEVITRVKEKGAYAYIGSSPNSYWGEDYYWSVGANAVFGVQPTFEGTSMGSYDATFLEDSYNTVNSIMWAGNLAATHAGNIGNITHIGAHYYWEAYHVLGDGSVMPYRAMPKTNTYTLPASLPQNQASYSIQASAGSYVAISKDGVLYGTGVANASGVATVSMTKQITENGNYDVVITRSNYLPVIKQIQVGEPHHHHHH

SEQ ID NO: 294 - protein, 772 aa, Porphyromonas gulae
MLIAASLLGVGLYAQNAKIKLDAPTTRATCTNNSFKQFDASFSFNEVELTKVETKGGTFASVSIPGAFPTGEIGSPEVPAVRKLIAVPVGATPIVRVKNFTEQVYSLNQYGSEKLMPHQPSMSKSDDPEKVPFVYNAAAYARKGFVGQELTQVEVLGTMRGVRVAALTINPVQYDAAANQLKVRNNIEIEVSFQGADEVATQRLYDASYSPYFETAYKQLFNKDVYTDHPDLYKTPARMLVVAGAKFKEALKPWLTWKAQKGFYLDVHYTDEAEVGTTNASIKAFIHKKYNDGLAANAAPVFLALIGDTDVISGEKGKKTKEVTDLYYSAVDGDYFPEMYSFRMSASSGEELKNIIDKVLMYEKATMPDKSYLEKVLLIAGADYNWNPKVGQQTIKYGMQYYFNQEHGYTDVYSYLKAPYTGCYSHLNTGVSFVNYTAHGSETSWADPSLTTSQLKALTNKDKYFLAIGNCCITAQFDYPQPCFGEVITRVKEKGAYAYIGSSPSSYWGEDYYWSVGANAVFGVQPTYEGTTMGSYDATFLEDSYNTVNSIMWAGNLAATHAGNIGNITHIGAHYYWEAYHVLGDGSVMPYRAMPKTNTYTLPASLPQNQATYSIQASAGSYVAISKDGVLYGTGVANASGVATVNMTKLITENGNYDVVITRSNYLPVIKQVQAGEPSPYQPVSNLSATVEGQKVTLKWEAPAAGNRLVCNCRRTESDTQMGSSCCRQSCRSSERRLRERHTFRMEDYRCRRRRQQLDDYTSSRRVFFHRS

SEQ ID NO: 295 - protein, 814 aa, Porphyromonas gulae
MRKLLLLIAASLLGVGLYAQNAKIKLDAPTTRAMCTNSSFKQFDASFSFNEVELKRVETKGGTFASVSIPGTFPTGEFGAPEVPAVRKLIAVPVGATPIVRVKNFTEQVYSLNQYGSEKLMPHQPSMSKSDDPEKVPFVYNAAAYARKGFVGQELTQVEVLGTMRGVRVAALTINPVQYDAAANQLKVRNNIEIEVSFQGADEVATQRLYDASYSPYFETAYKQLFNKDVYTDHPDLYKTPARMLVVAGAKFKEALKPWLTWKAQKGFYLDVHYTDEAEVGTTNASIKAFIHKKYNDGLAANAAPVFLALIGDTDVISGEKGKKTKEVTDLYYSAVDGDYFPEMYSFRMSASSGEELKNIIDKVLMYEKATMPDKSYLEKVLLIAGADYNWNPKVGQQTIKYGMQYYFNQEHGYTDVYSYLKAPYTGCYSHLNTGVSFVNYTAHGSETSWADPSLTTSQLKALTNKDKYFLAIGNCCITAQFDYPQPCFGEVITRVKEKGAYAYIGSSPSSYWGEDYYWSVGANAVFGVQPTYEGTTMGSYDATFLEDSYNTVNSIMWAGNLAATHAGNIGNITHIGAHYYWEAYHVLGDGSVMPYRAMPKTNTYTLPASLPQNQATYSIQASAGSYVAISKDGVLYGTGVANASGVATVNMTKLITENGNYDVVITRSNYLPVIKQVQAGEPSPYQPVSNLSATVEGQKVTLKWEAPAAGNRAEVVNEGFESGIPSAWKTIDADGDGNNWTTTPPPGGSSFTGHNGGSCVSSASYINYQGAQTPDNYLITPELSLPSGGTLTFWVCAQDANYASEHYAVYASS

SEQ ID NO: 296 - protein, 689 aa, Porphyromonas gulae
MKKLNKFVSIALCSSLLGGMAFAQEAELGRNPNVRLLESAQQSVTKVQFRMDNLKFTEVQTPKGMAQVPTYTEGVNLSEKGMPTLPILSRSLAVSDTREMKVEVISSKFIEKKNVLIAPSKGMIMRNEDPNKIPYVYGKSYSQDKFFPGEIATLDDPFIVRDVRGQVVTFAPLQYNPVTKTLRIYTEITVAVSETAQPGKNALKAKGTFAGFEDTYKRLFMNYEPGRYTPLEEKQDGRMIVIVPQEFKDDINDFVAWKNQRGLRTEVKVAEEIASPVTANAVRAFVKAEYEKPGNDLMYVLLIGDNKHIPAAQGAGGKSDQVFGQIVGNDHYNEIFIGRFSCESKADLKTQIDRTIHYERDVKANEAWLGRALCIASSDGGSFADNGETDIQHETVIANLLESYGYTYISKRFGDYNVNANHIISDFNSGICTTNYTGHGSDTAWGTSGFNTTHMKQLANYNQLPYVFDVACVNGNFLASAPCFAEGLMRAQKDNKPTGAIAIIASTINQPWNPPMRGQDEMNEILCEKHTNNIKRTFGGITTNGIFGMLEKYKASAFATADTWTVFGDPSLLVRTLTPKTMTVTAPAQINLTDASVNVSCDFNGAIATISANGKMFGSAVVENGTATINLAGLTNESTVTLTVVGYNKETVVKAISTNGEPSPYQPVSNLSATVEGQKVTLKWEAPAA

SEQ ID NO: 297 - protein, 435 aa, Porphyromonas gingivalis
YTPVEEKENGRMIVIVAKKYEGDIKDFVDWKNQRGLRTEVKVAEDIASPVTANAIQQFVKQEYEKEGNDLTYVLLVGDHKDIPAKITPGIKSDQVYGQIVGNDHYNEVFIGRFSCESKEDLKTQIDRTIHYERNITTEDKWLGQALCIASAEGGPSADNGESDIQHENVIANLLTQYGYTKIIKCYDPGVTPKNIIDAFNGGISLVNYTGHGSETAWGTSHFGTTHVKQLTNSNQLPFIFDVACVNGDFLFSMPCFAEALMRAQKDGKPTGTVAIIASTIDQYWAPPMRGQDEMNEILCEKHPNNIKRTFGGVTMNGMFAMVEKYKKDGENMLDTWTVFGDPSLLVRTLVPTEMQVTAPANISASAQTFEVACDYNGAIATLSDDGDMVGTAIVKDGKAIIKLNESIADETNLTLTVVGYNKVTVIKDVKVEGTS

SEQ ID NO: 298 - protein, 1283 aa, unclassified Cloacimonetes
MKKFVILISVLLFAFTLFAGQQTWIPLNGDAEKAVEVEVLTSNDNLIEIEYAVNGFYKEEVMIDGKAYSKIILLHEGFFLDRGYPELPHINRSILIPPRSNMEVAVVNSEYEEFDNIYVIPSKGSFSREINPEDVPYTFDPMYSEDAWYPQDIVFARDPYILRDARGMVIQVQPFQYNPVQHKLRVYTNISVQVTENGYSDINTKDEGLFEKESVVASFLEIYKTQFINFEQAAQNNRHTPTPAVGKMLIITYDDFADEMQPLYEWKNKKGIPTQMVNVSTIGNNYTSIKNYIQNLYNTDQLTFILLVGDAAQVQPYGTNKDPLYACLEGGDYYPDAFIGRFSAETGAHVETQVDRVLYYEADPFITGDWMHKGTGVASNLGPGYNGWDDNEMMDIIRDSLLTWNYTEVDQIYDPSCSALDVSNAINAGRGIVNYCGHGSTTSWGTTGFSNTHINQLTNDNMWPFIICVACYNGNFTGTTCFAEAWLRATNNTSGTPTGAIGVYASVISQDWTPPMIAEYHSNMFLLHEQVTTLGNYYFSGSMQMMDENTGGQNEFQYWTVFGDPSLKLRTDALTSMTVNHNPIIPLGSTTYEVEVVGIENALIGLYMEGTLYGYGYTDNTGHVTVNLDVPLVNPGQMALTVTAYNTIPYTTLLDAIVPVQVDITPDNINVNQATNVTVTVMDSDGINPEIGVNVWAEGLDYTSDIEVTDTNGEAILSINYQFGPTLQICGQRPDEDYLLFNEALVVNALSLIDPNIDVTTTFGLYDTLAMNMEASINQYCTNDETTLWAKLNNDDYTSTSNNSLLMTPDELGKVHTIISKSGYDLYKEDFPVIVAFGTVSGILTDSDNGSAISNAQVRFYEEGAVPNDDPLFTATTNSSGLYNVVSEQAVDHYDIYIDKWGFNPYQELSYFLGYGANTHDMQLDPVESGNVSGAVYDYFMYIGSGTIHYYRQDNGEEYAAVDISNGTYSVSLPHFNYYVYVSAPAHVPYSGTLLVNGDMVINYHLGYAALFDDAEDGMTQWISADWQLTDETCVSPTHSFTDSPGGSYPSSTTAIMQLTDPISLGSMKGSANLHFNAKWDIESNWDYAQVQASTDGTTWTALEGEYTEPGIGTFQPSGEPVYDGTQADWVAETSDLSDFAGEDQVYIRFLMASDGNVEEDGIHVDDILIGDPNSSYEIPVVTVNDPHPVHVVSLYQNFPNPVRNSTTFSFALPQDIQKAELSIYNLKGQLVKTFTPNIDEGPHFEIQWNGKDSFNKLVASGVYFYRLTTDRKEITKKLLILQ

SEQ ID NO: 299 - protein, 1209 aa, unclassified Cloacimonetes
IMPVQPSLSKSTDPSTVPFEFDEDEYNVNAYNEEELATVEALGTLRGLRLAQLVVAPVRYNPVEEKIKFYNNIKVQVTFHNPDIAETEYIKAATYSPYFDVITKRIFNGRDHGYPSHPDLVTYPVKYLIVAHRMFEATLEDFIEWKTQKGFEVIVGYTDVIGTTAIQIKTWVHDQYNAGTPSDPAPSFVLFVGDTGQVTSETGSSTSKVTDLYYCSVDGDMFPEMYYGRFSATTTAQLQTQIDRTLYYEKYQFANPSFLDNVTLIAGYDGSGHNPTHGQPVVNYGTDNYFNATHGFVDVYAYLTSPYDGCYDTINDGICMINYTAHGSQTSWGTPNMNQTMVNNLTNVGKYPLAIGNCCLSGDFGYTECFGETWARATDASTGDPTGAIGYIASAPSSYWHEDVYWAIGAFPTVGSGPTPPTYDETSWGAYDAPFVSDYVCQDALNFIGNLAVSEAADLGYPQQSSPLYYWQAYNLLGDPSVVVYMTQGSTNLVTFPGLLPIGATSFSVQAEPGSYVAISMNGVLHGTALADAFGTAVVTLDPPFTTAGTADIVVTKPQYQPVLTTVVVATPAVVYITPSSMPINTLTDVTIEVFEEDGTTPIPDVNILITGPGVYGTTSGITNASGSCTLNFGGEYGGPEILNVIGWRTGDGYNLVEEPFAITGGLDLTNLEIWLTTDFGLQDTFGLNLPGTVHFSQDEPGCTYGLYIVAEDTTIYSSEDQITYTPTCITNVLASIMKSGYNMYQETFTTIEVFGTVSGIVTDSDNGVTIANAEVRFYEQGGDPTEPPLFSDETDASGYYEITTEYPVDHYDIYIDKWGFDPYQELEFFLNYGANTHNIAMDPGETSMVSGQLIDDFLVLNSGTLSYYRSDNGEEYATIEVTDGNYEVIIPNFTYDIYVSSPGHVPYSGSLTVEGDMGINYHLGYAAIFADFEQNDGDFVSNNPSGWQWGIPSGGEIYAHSGTHCWATVIDGYYGVDYADWTLDSPTFSINGAGMLTFWHFYDFEGSSTYYDGGNVSISTNGGVSFEVITPVGGYTGPISGLDGEQGFGNNIDEWEQVEFDISGYTGDNAILRWHFGTDVSQHDYWGWYIDDVLYGDPNSSWQEINFDNDPNPQIVTTKLQQNFPNPVLNSTTISFMLPMNISKAELKIYNIKGQLVQTFIPDVSNGPLHEVQWDGKDLTEKPVANGIYFYRLTTDNKELTKKMILLR

SEQ ID NO: 300 - protein, 1207 aa, unclassified Cloacimonetes
IMPVQPSLSKSTDPSTVPFEFDEDEYNVNAYNEEELATVEALGTLRGLRLAQLVVAPVRYNPVEEKIKFYNNIKVQVTFHNPDIAETEYIKAATYSPYFDVITKRIFNGRDHGYPSHPDLVTYPVKYLIVAHRMFEATLEDFIEWKTQKGFEVIVGYTDVIGTTAIQIKTWVHDQYNAGTPSDPAPSFVLFVGDTGQVTSETGSSTSKVTDLYYCSVDGDMFPEMYYGRFSATTTAQLQTQIDRTLYYEKYQFANPSFLDNVTLIAGYDGSGHNPTHGQPVVNYGTDNYFNATHGFVDVYAYLTSPYDGCYDTINDGICMINYTAHGSQTSWGTPNMNQTMVNNLTNVGKYPLAIGNCCLSGDFGYTECFGETWARATDASTGDPTGAIGYIASAPSSYWHEDVYWAIGAFPTVGSGPTPPTYDETSWGAYDAPFVTDYVCQDALNFVGNLAVTEAANLSYPQHSSPLYYWQAYNLLGDPSVVVYMTQGSTNSVTFPGLLPIGSTTFSVQAEPGSYVAISMNGVLHGAALANDFGTADVLIDPFTVAGTADIIVTKPQYQPVLTTVLVATPAVVNITPSSMPINTLTDVSIDVFEEDGTTPIPDVNILITGPGVYGTTSGITNASGSCTLNFGGEYGGDTILNVIGWRTGDGYNLVEEPFAITGGLDLTNPAIWLTTDFGLQDTFGLNLPGTVLFSQDQTDCTYNLYIVAEDTTIYSSEDEITYTPTCITNVLAGIMKSGYNMYQETFTTIEVFGTVSGIVTDSDNGVAITDAEVRFYEQGSDPTEPPLFSDETDATGFYEITTEYPVEHYDIYIDKWGFDPYQELGFFLNYSANTHDIVIDPVESSMVTGHLIDDFLILGSGTLSYYRTDTGEEYASVDVSGGTYEVILPNFTYNIYVSSSQHVPYSGTLTVEGDMIINYHLGNAAIFADFEQDDGDFVSNDASGWQWGVPSGGEIFAHSGTKCWATVLDGYYGVDYADWTLDSSEFSISGSGMLTFWHYYDFEGSYTYWDGGNVSISTNGGISFEVITPLGGYTGTISALGEPGFGSSIDDWEQVEFDINGFTGDNAILRWHFASDYSANQYWGWYIDDVLYGDPTTSYPIPIYDNDPDHQIVTTKLQQNFPNPVLNSTTISFMMPMNVSKAELKIYNIKGQLVQSFIPDISTGPLHELQWDGKDMTEKPVANGIYFYRLTTNNKEIIRKMILIR

SEQ ID NO: 301 - protein, 650 aa, unclassified Cloacimonetes
MKKMAILLAIFLLLSFSLSAELIAEGNSKNSVSLLIDNESETILEYRISEFEKNMITIEGEEWYQIRLPKEGITQDKGYPELPVFNRSIIIPDQALMAIEVFDLEFKDYPIKVAPSKGVITRDINPATIPYTFDNVYQENSFYPQKMVALSEPYILRDFRGITVLTTPFAYNPVTGTLRVYTSYKVKVYNQGNDTVNTFNRSRTSVSRSFCPLYENHFLNWNSYRYTPVDDSYGKLLVICHSSFLTQIAPYVNWKRQKGIDTELVEFSTIGTTANQLKAYIQNRYNADNSITFVQLVGDAPQIPTLSYSGGGSDPSFSLVAGSDNYPDIFIGRFSAQTTAEVTAQVNKTIQYEKDLNTSATWLSKAMGIASAEGSGGQGDNGESDITHMNLIRTKLLNYGYTSVDQIYDPGASASTVTTNVNTGRGFINYVGHGSDTTWGTTGFSNTNASALTNGNKVPFIMDVACVNGNFVSITCFAEAWMRNANGGAVGIYASSINQSWASPMRAQDEVTDLLISETHTTLGGLYYNGSCKMMDVYGSDGVNMFKTWHIFGDASLQVRSKTPLAMTVSHPTSITSGINNITISTGVANALVAITYNNTIYGKAVTNSSGSAIVNISNPPSGEITYTVTVTAFNRVTYTGSLQQVNVPP

SEQ ID NO: 302 - protein, 452 aa, Porphyromonas gingivalis
DVYTDHGDLYNTPVRMLVVAGAKFKEALKPWLTWKAQKGFYLDVHYTDEAEVGTTNASIKAFIHKKYNDGLAASAAPVFLALVGDTDVISGEKGKKTKKVTDLYYSAVDGDYFPEMYTFRMSASSPEELTNIIDKVLMYEKATMPDKSYLEKVLLIAGADYSWNSQVGQPTIKYGMQYYYNQEHGYTDVYNYLKAPYTGCYSHLNTGVSFANYTAHGSETAWADPLLTTSQLKALTNKDKYFLAIGNCCITAQFDYVQPCFGEVITRVKEKGAYAYIGSSPNSYWGEDYYWSVGANAVFGVQPTFEGTSMGSYDATFLEDSYNTVNSIMWAGNLAATHAGNIGNITHIGAHYYWEAYHVLGDGSVMPYRAMPKTNTYTLPASLPQNQASYSIQASAGSYVAISKDGVLYGTGVANASGVATVSMTKQITENGNYDVVITRSNYLPVIKQIQV

SEQ ID NO: 303 - protein, 1704 aa, Porphyromonas gingivalis
MKNLNKFVSIALCSSLLGGMAFAQQTELGRNPNVRLLESTQQSVTKVQFRMDNLKFTEVQTPKGMAQVPTYTEGVNLSEKGMPTLPILSRSLAVSDTREMKVEVVSSKFIEKKNVLIAPSKGMIMRNEDPKKIPYVYGKSYSQNKFFPGEIATLDDPFILRDVRGQVVNFAPLQYNPVTKTLRIYTEITVAVSETSEQGKNILNKKGTFAGFEDTYKRMFMNYEPGRYTPVEEKQNGRMIVIVAKKYEGDIKDFVDWKNQRGLRTEVKVAEDIASPVTANAIQQFVKQEYEKEGNDLTYVLLVGDHKDIPAKITPGIKSDQVYGQIVGNDHYNEVFIGRFSCESKEDLKTQIDRTIHYERNITTEDKWLGQALCIASAEGGPSADNGESDIQHENVIANLLTQYGYTKIIKCYDPGVTPKNIIDAFNGGISLVNYTGHGSETAWGTSHFGTTHVKQLTNSNQLPFIFDVACVNGDFLFSMPCFAEALMRAQKDGKPTGTVAIIASTINQSWASPMRGQDEMNEILCEKHPNNIKRTFGGVTMNGMFAMVEKYKKDGEKMLDTWTVFGDPSLLVRTLVPTKMQVTAPAQINLTDASVNVSCDYNGAIATISANGKMFGSAVVENGTATINLTGLTNESTLTLTVVGYNKETVIKTINTNGEPNPYQPVSNLTATTQGQKVTLKWDAPSTKTNATTNTARSVDGIRELVLLSVSDAPELLRSGQAEIVLEAHDVWNDGSGYQILLDADHDQYGQVIPSDTHTLWPNCSVPANLFAPFEYTVPENADPSCSPTNMIMDGTASVNIPAGTYDFAIAAPQANAKIWIAGQGPTKEDDYVFEAGKKYHFLMKKMGSGDGTELTISEGGGSDYTYTVYRDGTKIKEGLTATTFEEDGVATGNHEYCVEVKYTAGVSPKVCKDVTVEGSNEFAPVQNLTGSAVGQKVTLKWDAPNGTPNPNPNPNPNPGTTTLSESFENGIPASWKTIDADGDGHGWKPGNAPGIAGYNSNGCVYSESFGLGGIGVLTPDNYLITPALDLPNGGKLTFWVCAQDANYASEHYAVYASSTGNDASNFTNALLEETITAKGVRSPEAIRGRIQGTWRQKTVDLPAGTKYVAFRHFQSTDMFYIDLDEVEIKANGKRADFTETFESSTHGEAPAEWTTIDADGDGQGWLCLSSGQLDWLTAHGGTNVVASFSWNGMALNPDNYLISKDVTGATKVKYYYAVNDGFPGDHYAVMISKTGTNAGDFTVVFEETPNGINKGGARFGLSTEANGAKPQSVWIERTVDLPAGTKYVAFRHYNCSDLNYILLDDIQFTMGGSPTPTDYTYTVYRDGTKIKEGLTETTFEEDGVATGNHEYCVEVKYTAGVSPKECVNVTINPTQFNPVKNLKAQPDGGDVVLKWEAPSAKKTEGSREVKRIGDGLFVTIEPANDVRANEAKVVLAADNVWGDNTGYQFLLDADHNTFGSVIPATGPLFTGTASSNLYSANFEYLIPANADPVVTTQNIIVTGQGEVVIPGGVYDYCITNPEPASGKMWIAGDGGNQPARYDDFTFEAGKKYTFTMRRAGMGDGTDMEVEDDSPASYTYTVYRDGTKIKEGLTETTYRDAGMSAQSHEYCVEVKYAAGVSPKVCVDYIPDGVADVTAQKPYTLTVVGKTITVTCQGEAMIYDMNGRRLAAGRNTVVYTAQGGYYAVMVVVDGKSYVEKLAVK

SEQ ID NO: 304 - protein, 736 aa, Porphyromonas gingivalis
MKKNFSRIVSIVAFSSLLGGMAFAQPAERGRNPQVRLLSAEQSMSKVQFRMDNLQFTDVQTSKGVAQVPTFTEGVNISEKGTPILPILSRSLAVSETRAMKVEVVSSKFIEKKDVLIAPSKGVISRAENPDQIPYVYGQSYNEDKFFPGEIATLSDPFILRDVRGQVVNFAPLQYNPVTKTLRIYTEIVVAVSETAEAGQNTISLVKNSTFTGFEDIYKSVFMNYEATRYTPVEEKENGRMIVIVAKKYEGDIKDFVDWKNQRGLRTEVKVAEDIASPVTANAIQQFVKQEYEKEGNDLTYVLLVGDHKDIPAKITPGIKSDQVYGQIVGNDHYNEVFIGRFSCESKEDLKTQIDRTIHYERNITTEDKWLGQALCIASAEGGPSADNGESDIQHENVIANLLTQYGYTKIIKCYDPGVTPKNIIDAFNGGISLVNYTGHGSETAWGTSHFGTTHVKQLTNSNQLPFIFDVACVNGDFLFSMPCFAEALMRAQKDGKPTGTVAIIASTIDQYWAPPMRGQDEMNEILCEKHPNNIKRTFGGVTMNGMFAMVEKYKKDGENMLDTWTVFGDPSLLVRTLVPTEMQVTAPANISASAQTFEVACDYNGAIATLSDDGDMVGTAIVKDGKAIIKLNESIADETNLTLTVVGYNKVTVIKDVKVEGTSIADVANDKPYTVAVSGKTITVESPAAGLTIFDMNGRRVATAKNRMVFEAQNGVYAVRIATEGKTYTEKVIVK

SEQ ID NO: 305 - protein, 1723 aa, Porphyromonas gingivalis
MRKLLLLIAASLLGVGLYAQNAKIKLDAPTTRTTCTNNSFKQFDASFSFNEVELTKVETKGGTFASVSIPGAFPTGEVGSPEVPAVRKLIAVPVGATPVVRVKSFTEQVYSLNQYGSEKLMPHQPSMSKSDDPEKVPFAYNAAAYARKGFVGQELTQVEMLGTMRGVRIAALTINPVQYDVVANQLKVRNNIEIEVSFQGADEVATQRLYDASFSPYFETAYKQLFNRDVYTDHGDLYNTPVRMLVVAGAKFKEALKPWLTWKAQKGFYLDVHYTDEAEVGTTNASIKAFIHKKYNDGLAASAAPVFLALVGDTDVISGEKGKKTKKVTDLYYSAVDGDYFPEMYTFRMSASSPEELTNIIDKVLMYEKATMPDKSYLEKALLIAGADSYWNPKIGQQTIKYAVQYYYNQDHGYTDVYSYPKAPYTGCYSHLNTGVGFANYTAHGSETSWADPSLTATQVKALTNKNKYFLAIGNCCVTAQFDYPQPCFGEVMTRVKEKGAYAYIGSSPNSYWGEDYYWSVGANAVFGVQPTFEGTSMGSYDATFLEDSYNTVNSIMWAGNLAATHAENIGNVTHIGAHYYWEAYHVLGDGSVMPYRAMPKTNTYTLPASLPQNQASYSIQASAGSYVAISKDGVLYGTGVANASGVATVNMTKQITENGNYDVVITRSNYLPVIKQIQAGEPSPYQPVSNLTATTQGQKVTLKWDAPSAKKAEGSREVKRIGDGLFVTIEPANDVRANEAKVVLAADNVWGDNTGYQFLLDADHNTFGSVIPATGPLFTGTASSNLYSANFEYLIPANADPVVTTQNIIVTGQGEVVIPGGVYDYCITNPEPASGKMWIAGDGGNQPARYDDFTFEAGKKYTFTMRRAGMGDGTDMEVEDDSPASYTYTVYRDGTKIKEGLTATTFEEDGVAAGNHEYCVEVKYTAGVSPKVCKDVTVEGSNEFAPVQNLTGSAVGQKVTLKWDAPNGTPNPNPNPNPGTTTLSESFENGIPASWKTIDADGDGHGWKPGNAPGIAGYNSNGCVYSESFGLGGIGVLTPDNYLITPALDLPNGGKLTFWVCAQDANYASEHYAVYASSTGNDASNFTNALLEETITAKGVRSPEAIRGRIQGTWRQKTVDLPAGTKYVAFRHFQSTDMFYIDLDEVEIKANGKRADFTETFESSTHGEAPAEWTTIDADGDGQGWLCLSSGQLDWLTAHGGTNVVASFSWNGMALNPDNYLISKDVTGATKVKYYYAVNDGFPGDHYAVMISKTGTNAGDFTVVFEETPNGINKGGARFGLSTEADGAKPQSVWIERTVDLPAGTKYVAFRHYNCSDLNYILLDDIQFTMGGSPTPTDYTYTVYRDGTKIKEGLTETTFEEDGVATGNHEYCVEVKYTAGVSPKKCVNVTINPTQFNPVKNLKAQPDGGDVVLKWEAPSAKKAEGSREVKRIGDGLFVTIEPANDVRANEAKVVLAADNVWGDNTGYQFLLDADHNTFGSVIPATGPLFTGTASSNLYSANFEYLIPANADPVVTTQNIIVTGQGEVVIPGGVYDYCITNPEPASGKMWIAGDGGNQPARYDDFTFEAGKKYTFTMRRAGMGDGTDMEVEDDSPASYTYTVYRDGTKIKEGLTETTYRDAGMSAQSHEYCVEVKYAAGVSPKVCVDYIPDGVADVTAQKPYTLTVVGKTITVTCQGEAMIYDMNGRRLAAGRNTVVYTAQGGYYAVMVVVDGKSYVEKLAVK

SEQ ID NO: 306 - protein, 690 aa, Porphyromonas gulae
MKKLNKFVSIALCSSLLGGMAFAQEAELGRNPNVRLLESAQQSVTKVQFRMDNLKFTEVQTPKGMAQVPTYTEGVNLSEKGMPTLPILSRSLAVSDTREMKVEVISSKFIEKKNVLIAPSKGMIMRNEDPNKIPYVYGKSYSQDKFFPGEIATLDDPFIVRDVRGQVVTFAPLQYNPVTKTLRIYTEITVAVSETAQPGKNALKAKGTFAGFEDTYKRLFMNYEPGRYTPLEEKQDGRMIVIVPQEFKDDINDFVAWKNQRGLRTEVKVAEEIASPVTANAVRAFVKAEYEKPGNDLMYVLLIGDNKHIPAAQGAGGKSDQVFGQIVGNDHYNEIFIGRFSCESKADLKTQIDRTIHYERDVKANEAWLGRALCIASSDGGSFADNGETDIQHETVIANLLESYGYTYISKRFGDYNVNANHIISDFNSGICTTNYTGHGSDTAWGTSGFNTTHMKQLANYNQLPYVFDVACVNGNFLASAPCFAEGLMRAQKDNKPTGAIAIIASTINQPWNPPMRGQDEMNEILCEKHTNNIKRTFGGITTNGIFGMLEKYKASAFATADTWTVFGDPSLLVRTLTPKTMTVTAPAQINLTDASVNVSCDFNGAIATISANGKMFGSAVVENGTATINLAGLTNESTVTLTVVGYNKETVVKAISINGEPSPYEPVSNLSATVEGQKVTLKWEAPAAG

SEQ ID NO: 307 - protein, 736 aa, Porphyromonas gulae
MKKNFNRIVSIVAFSSLLGGMVFAQPAERGRNPQVRLLSAERSMSKVQFRMDNLQFTDVQTAQGVAQVPTFTEGVNISEKGMPILPILSRSLAVSETRAMKVEVVSSKFIEKKNVLIAPSKGVISRAENPDQVPYVYGQSYNEDKFFPGEIATLSDPFILRDVRGQVVNFAPLQYNPVTKTLRIYTEIVVAVSETAEAGQNAISLVKNSTFTGFEDIYKSVFMNYEATRYTPVEEKENGRMIVIVPQKYKDDIEEFVKWKEQRGLETDVKVAEEIATPITAEAIQKFVKEEYQKEGNNLTYVLLIGDHKDIPAKILPGIKSDQVYGQIVGNDHYNEVFIGRFSCESKEDLKTQIDRTIHYERNITTEDKWLGQALCIASNEGAGGQGDNGESDIQHQNVIANLLTKYGYTKIIKCYDPGVTPKHIIDAFNGGISLANYTGHGSDTFWVTSHFGVQHMKDLTNYNQLPFIFDVACVNGNFLFKTCFAEALMRAQKDGKPKGTVAIIASTINQSWASPMRGQDEMNSILCEQYPSNIKRTFGGVTMNGMFAMVEKYKKDGENMLDTWTVFGDPSLLVRTLVPTEMQVTAPANISPSAQTFEVACDYDGAIATLSDDGDMVGTAKVKDGKAIIKIDEDISDETKLTLTVVGYNKVTVIKEVKVQGTSVANVANDKPYTVAVSGKTITVESPAAELTIFDMNGRRVAAAKNGMVFEAQNGVYAVRIAAEGKTYTEKVIVK

SEQ ID NO: 308 - protein, 736 aa, Porphyromonas gulae
MKKNFNRIVSIVAFSSLLGGMVFAQPAERGRNPQVRLLSAERSMSKVQFRMDNLQLTEVQTAQGVAQVPTFTEGVNISEKGMPTLPILSRSLAVSETRAMKVEVVSSKFIEKKNVLIAPSKGVISRAENPDQIPYVYGQSYNEDKFFPGEIATLSDPFILRDVRGQVVNFAPLQYNPVTKTLRIYTEIVVAVSETAEAGQNAISLVKNSTFTGFEDIYKSVFMNYEATRYTPVEEKENGRMIVIVPQKYKDDIEEFVKWKEQRGLETDVKVAEEIATPITAEAIQKFVKEEYQKEGNNLTYVLLIGDHKDIPAKILPGIKSDQVYGQIVGNDHYNEVFIGRFSCESKEDLKTQIDRTIHYERNITTEDKWLGQALCIASDEGAGGQGDNGESDIQHQNVIANLLTKYGYTKIIKCYDPGVTPKHIIDAFNGGISLANYTGHGSDTFWVTSHFGVQHMKDLTNYNQLPFIFDVACVNGNFLFKTCFAEALMRAQKDGKPKGTVAIIASTINQSWASPMRGQDEMNSILCEQYPSNIKRTFGGVTMNGMFAMVEKYKKDGENMLDTWTVFGDPSLLVRTLVPTEMQVTAPANISPSAQTFEVACDYDGAIATLSDDGDMVGTAKVKDGKAIIKIDEDISDETKLTLTVVGYNKVTVIKEVKVQGTSVANVANDKPYTVAVSGKTITVESPAAELTIFDMNGRRVAAAKNRMVFQAQNGVYAVRITAEGKTYTEKVAVK

SEQ ID NO: 309 - protein, 695 aa, Porphyromonas gulae
MKKLNKFVSIALCSSLLGGMAFAQEAELGRNPNVRLLESAQQSVTKVQFRMDNLKFTEVQTPKGMAQVPTYTEGVNLSEKGMPTLPILSRSLAVSDTREMKVEVISSKFIEKKNVLIAPSKGMIMRNEDPNKIPYVYGKSYSQDKFFPGEIATLDDPFIVRDVRGQVVTFAPLQYNPVTKTLRIYTEITVAVSETAQPGKNALKAKGTFAGFEDTYKRLFMNYEPGRYTPLEEKQDGRMIVIVPQEFKDDINDFVAWKNQRGLRTEVKVAEEIASPVTANAVRAFVKAEYEKPGNDLMYVLLIGDNKHIPAAQGAGGKSDQVFGQIVGNDHYNEIFIGRFSCESKADLKTQIDRTIHYERDVKANEAWLGRALCIASSDGGSFADNGETDIQHETVIANLLESYGYTYISKRFGDYNVNANHIISDFNSGICTTNYTGHGSDTAWGTSGFNTTHMKQLANYNQLPYVFDVACVNGNFLASAPCFAEGLMRAQKDNKPTGAIAIIASTINQPWNPPMRGQDEMNEILCEKHTNNIKRTFGGITTNGIFGMLEKYKASAFATADTWTVFGDPSLLVRTLTPKTMTVTAPAQINLTDASVNVSCDFNGAIATISANGKMFGSAVVENGTATINLAGLTNESTVTLTVVGYNKETVVKAISTNGEPSPYQPVSNLSATVEGQKVTLKWEAPAAGNRAEV

SEQ ID NO: 310 - protein, 716 aa, Porphyromonas gulae
MRKLLLLIAASLLGVGLYAQNAKIKLDAPTTRAMCTNSSFKQFDASFSFNEVELKRVETKGGTFASVSIPGTFPTGEFGAPEVPAVRKLIAVPVGATPIVRVKNFTEQVYSLNQYGSEKLMPHQPSMSKSDDPEKVPFVYNAAAYARKGFVGQELTQVEVLGTMRGVRVAALTINPVQYDAAANQLKVRNNIEIEVSFQGADEVATQRLYDASYSPYFETAYKQLFNKDVYTDHPDLYKTPARMLVVAGAKFKEALKPWLTWKAQKGFYLDVHYTDEAEVGTTNASIKAFIHKKYNDGLAANAAPVFLALIGDTDVISGEKGKKTKEVTDLYYSAVDGDYFPEMYSFRMSASSGEELKNIIDKVLMYEKATMPDKSYLEKVLLIAGADYNWNPKVGQQTIKYGMQYYFNQEHGYTDVYSYLKAPYTGCYSHLNTGVSFVNYTAHGSETSWADPSLTTSQLKALTNKDKYFLAIGNCCITAQFDYPQPCFGEVITRVKEKGAYAYIGSSPSSYWGEDYYWSVGANAVFGVQPTYEGTTMGSYDATFLEDSYNTVNSIMWAGNLAATHAGNIGNITHIGAHYYWEAYHVLGDGSVMPYRAMPKTNTYTLPASLPQNQATYSIQASAGSYVAISKDGVLYGTGVANASGVATVNMTKLITENGNYDVVITRSNYLPVIKQVQAGEPSPYEPVSNLSATVEGQKVTLKWEAPAAGNRAEV

SEQ ID NO: 311 - protein, 736 aa, Porphyromonas gulae
MKKNFNRIVSIVAFSSLLGGMAFAQPAERGRNPQVRLLSAERSMSKVQFRMDNLQFTDVQTAQGVAQVPTFTEGVNISEKGMPTLPILSRSLAVSETRAMKVEVVSSKFIEKKNVLIAPSKGVISRAENPDQIPYVYGQSYNEDKFFPGEIATLSDPFILRDVRGQVVNFAPLQYNPVTKTLRIYTEIVVAVSETAEAGQNAISLVKNSTFTGFEDIYKSVFMNYEATRYTPVEEKENGRMIVIVPQKYKDDIEEFVKWKEQRGLETDVKVAEEIATPITAEAIQKFVKEEYQKEGNNLTYVLLIGDHKDIPAKILPGIKSDQVYGQIVGNDHYNEVFIGRFSCESKEDLKTQIDRTIHYERNITTEDKWLGQALCIASDEGAGGQGDNGESDIQHQNVIANLLTKYGYTKIIKCYDPGVKPQNIIDAFNGGISLANYTGHGSDTFWVTSHFGVQHMKDLTNYNQLPFIFDVACVNGNFLFKTCFAEALMRAQKDGKPKGTVAIIASTINQSWASPMRGQDEMNSILCEQYPSNIKRTFGGVTMNGMFAMVEKYKKDGENMLDTWTVFGDPSLLVRTLVPTEMQVTAPANISPSAQTFEVACDYDGAIATLSDDGDMVGTAKVKDGKAIIKIDEDISDETKLTLTVVGYNKVTVIKEVKVQGTSVANVANDKPYTVAVSGKTITVESPAAELTIFDMNGRRVAAAKNGMVFEAQNGVYAVRIAAEGKTYTEKVAVK

SEQ ID NO: 312 - protein, 1320 aa, Porphyromonas gulae
  misc_feature (750)..(750): Xaa can be any naturally occurring amino acid
  misc_feature (854)..(854): Xaa can be any naturally occurring amino acid
MRKLLLLIAASLLGVGLYAQNAKIKLDAPTTRAMCTNSSFKQFDASFSFNEVELKRVETKGGTFASVSIPGTFPTGEFGAPEVPAVRKLIAVPVGATPIVRVKNFTEQVYSLNQYGSEKLMPHQPSMSKSDDPEKVPFVYNAAAYARKGFVGQELTQVEVLGTMRGVRVAALTINPVQYDAAANQLKVRNNIEIEVSFQGADEVATQRLYDASYSPYFETAYKQLFNKDVYTDHPDLYKTPARMLVVAGAKFKEALKPWLTWKAQKGFYLDVHYTDEAEVGTTNASIKAFIHKKYNDGLAANAAPVFLALIGDTDVISGEKGKKTKEVTDLYYSAVDGDYFPEMYSFRMSASSGEELTNIINKVLMYEKATMPDKSYLEKALLIAGADSYWNPKIGQQTIKYAVQYYYNQDHGYTDVYSYPKAPYTGCYSHLNTGVGFANYTAHGSETSWADPSLTTSQLKALTNKDKYFLAIGNCCITAQFDYPQPCFGEVITRVKEKGAYAYIGSSPSSYWGEDYYWSVGANAVFGVQPTYEGTTMGSYDATFLEDSYNTVNSIMWAGNLAATHAGNIGNITHIGAHYYWEAYHVLGDGSVMPYRAMPKTNTYTLPASLPQNQATYSIQASAGSYVAISKDGVLYGTGVANASGVATVNMTKLITENGNYDVVITRSNYLPVIKQVQAGEPSPYEPVSNLSATVEGQKVTLKWDAPAAGNRAEVVNEGFESGIPSAWKTIDADGDGNNWDSAPIGESXVNEGFESGIPSAWKTIDADGDGNNWDSAPIGESFPGHNSVGCVSSASYINNVGPQTPDNYLITPELSLANGGTLTFWVCAQDAAWAGEHYAVYASSTGNDAVNXGTLTFWVCAQDAAWAGEHYAVYASSTGNDAVNFTNALLEETLTAKSVVTSPEAIRGTRAQGTWYQKTVQLPAGTKYVAFRHFNCTDFFWINLDDVVITGEGGTSVDYTYTVYRDGTKIKEGLTATTFEEEGVAPGNHEYCVEVKYTAGVSPKECKDVTVPGSGELAPVQNLTGSAAGQKVTLKWDAPNGTNPNPNPDPNPEPGLTESFDGGIPATWTLIDADGDGHGWKHGKAPGVAGYNSNGCVYSESFGLGGIGVLTPDNYLITPALNLPNGGKLTFWVCAQDADYASEHYAVYASSTGNAASNFTNALLEETLTAKGVRSPEAIRGRVQGTWYQKTVDLPAGTKYVAFRHFQSTDMFYIDIDEVEIKANAKRAEVVNEGFESGIPSAWKTIDADGDGNNWTTTPPPGGSSFTGHNGGSCVSSASYINYQGAQTPDNYLVTPELSLANGGTLTFWVCAQDANYA

SEQ ID NO: 313 - protein, 713 aa, Porphyromonas sp. COT-052 OH4946
MRKLLLLIAASLLGVGLYAQNAKIKLDAPTTRATCTNNSFKQFDASFSFNEVELTKVETKGGTFASVSIPGAFPTGEIGSPEVPAVRKLIAVPVGATPIVRVKNFTEQVYSLNQYGSEKLMPHQPSMSKSDDPEKVPFVYNAAAYARKGFVGQELTQVEVLGTMRGVRVAALTINPVQYDAAANQLKVRNNIEIEVSFQGADEVATQRLYDASYSPYFETAYKQLFNKDVYTDHPDLYKTPARMLVVAGAKFKEALKPWLTWKAQKGFYLDVHYTDEAEVGTTNASIKAFIHKKYNDGLAANAAPVFLALIGDTDVISGEKGKKTKEVTDLYYSAVDGDYFPEMYSFRMSASSGEELKNIIDKVLMYEKATMPDKSYLEKVLLIAGADYNWNPKVGQQTIKYGMQYYFNQEHGYTDVYSYLKAPYTGCYSHLNTGVSFVNYTAHGSETSWADPSLTTSQLKALTNKDKYFLAIGNCCITAQFDYPQPCFGEVITRVKEKGAYAYIGSSPSSYWGEDYYWSVGANAVFGVQPTYEGTTMGSYDATFLEDSYNTVNSIMWAGNLAATHAGNIGNITHIGAHYYWEAYHVLGDGSVMPYRAMPKTNTYTLPASLPQNQATYSIQASAGSYVAISKDGVLYGTGVANASGVATVNMTKLITENGNYDVVITRSNYLPVIKQVQAGEPSPYQPVSNLSATVEGQKVTLKWEAPAAGNR

SEQ ID NO: 314 - protein, 690 aa, Porphyromonas sp. COT-052 OH4946
MKKLNKFVSIALCSSLLGGMAFAQEAELGRNPNVRLLESAQQSVTKVQFRMDNLKFTEVQTPKGMAQVPTYTEGVNLSEKGMPTLPILSRSLAVSDTREMKVEVISSKFIEKKNVLIAPSKGMIMRNENPNKIPYVYGKSYSQDKFFPGEIATLDDPFIVRDVRGQVVTFAPLQYNPVTKTLRIYTEITVAVSETAQPGKNALKAKGTFAGFEDTYKRLFMNYEPGRYTPLEEKQDGRMIVIVPQEFKDDINDFVAWKNQRGLRTEVKVAEEIASPVTANAVRAFVKAEYEKPGNDLMYVLLIGDNKHIPAAQGAGGKSDQVFGQIVGNDHYNEIFIGRFSCESKADLKTQIDRTIHYERDVKANEAWLGRALCIASSDGGSFADNGETDIQHETVIANLLESYGYTYISKQFGDYNVNANHIISDFNSGICTTNYTGHGSDTAWGTSGFNTTHMKQLANYNQLPYVFDVACVNGNFLASAPCFAEGLMRAQKDNKPTGAIAIIASTINQPWNPPMRGQDEMNEILCEKHTNNIKRTFGGITTNGIFGMLEKYKASAFATADTWTVFGDPSLLVRTLTPKTMTVTAPAQINLTDASVNVSCDFNGAIATISANGKMFGSAVVENGTATINLAGLTNESTVTLTVVGYNKETVVKAISTNGEPSPYQPVSNLSATVEGQKVTLKWEAPAAG

SEQ ID NO: 315 - protein, 736 aa, Porphyromonas sp. COT-052 OH4946
MKKNFNRIVSIVAFSSLLGGMVFAQPAERGRNPQVRLLSAERSMSKVQFRMDNLQLTDVQTAQGVAQVPTFTEGVNISEKGMPTLPILSRSLAVSETRAMKVEVVSSKFIEKKNVLIAPSKGVISRAENPDQIPYVYGQSYNEDKFFPGEIATLSDPFILRDVRGQVVNFAPLQYNPVTKTLRIYTEIVVAVSETAEAGQNAISLVKNSTFTGFEDIYKSVFMNYEATRYTPVEEKENGRMIVIVPQKYKDDIEEFVKWKEQRGLETDVKVAEEIATPITAEAIQKFVKEEYQKEGNNLTYVLLIGDHKDIPAKILPGIKSDQVYGQIVGNDHYNEVFIGRFSCESKEDLKTQIDRTIHYERNITTEDKWLGQALCIASNEGAGGQGDNGESDIQHQNVIANLLTKYGYTKIIKCYDPGVKPQNIIDAFNGGISLANYTGHGSDTFWVTSHFGVQHMKDLTNYNQLPFIFDVACVNGNFLFKTCFAEALMRAQKDGKPKGTVAIIASTINQSWASPMRGQDEMNSILCEQYPSNIKRTFGGVTMNGMFAMVEKYKKDGENMLDTWTVFGDPSLLVRTLVPTEMQVTAPANISPSAQTFEVACDYDGAIATLSDDGDMVGTAKVKDGKAIIKIDEDISDETKLTLTVLGYNKVTVIKEVKVQGTSVANVANDKPYTVAVSGKTITVESPAAELTIFDMNGRRVAAAKNGMVFEAQNGVYAVRIAVEGKTYTEKVIVK

SEQ ID NO: 316 - protein, 690 aa, Porphyromonas gulae
MKKLNKFVSIALCSSLLGGMAFAQEAELGRNPNVRLLESAQQSVTKVQFRMDNLKFTEVQTPKGMAQVPTYTEGVNLSEKGMPTLPILSRSLAVSDTREMKVEVISSKFIEKKNVLIAPSKGMIMRNENPNKIPYVYGKSYSQDKFFPGEIATLDDPFIVRDVRGQVVTFAPLQYNPVTKTLRIYTEITVAVSETAQPGKNALKAKGTFAGFEDTYKRLFMNYEPGRYTPLEEKQDGRMIVIVPQEFKDDINDFVAWKNQRGLRTEVKVAEEIASPVTANAVRAFVKAEYEKPGNDLMYVLLIGDNKHIPAAQGAGGKSDQVFGQIVGNDHYNEIFIGRFSCESKADLKTQIDRTIHYERDVKANEAWLGRALCIASSDGGSFADNGETDIQHETVIANLLESYGYTYISKRFGDYNVNANHIISDFNSGICTTNYTGHGSDTAWGTSGFNTTHMKQLANYNQLPYVFDVACVNGNFLASAPCFAEGLMRAQKDNKPTGAIAIIASTINQPWNPPMRGQDEMNEILCEKHTNNIKRTFGGITTNGIFGMLEKYKASAFATADTWTVFGDPSLLVRTLTPKTMTVTAPAQINLTDASVNVSCDFNGAIATISANGKMFGSAVVENGTATINLAGLTNESTVTLTVVGYNKETVVKAISTNGEPSPYEPVSNLSATVEGQKVTLKWDAPAAG

SEQ ID NO: 317 - protein, 736 aa, Porphyromonas gulae
MKKNFNRIVSIVAFSSLLGGMVFAQPAERGRNPQVRLLSAERSMSKVQFRMDNLQLTDVQTAQGVAQVPTFTEGVNISEKGMPTLPILSRSLAVSETRAMKVEVVSSKFIEKKNVLIAPSKGVISRAENPDQIPYVYGQSYNEDKFFPGEIATLSDPFILRDVRGQVVNFAPLQYNPVTKTLRIYTEIVVAVSETAEAGQNAISLVKNSTFTGFEDIYKSVFMNYEATRYTPVEEKENGRMIVIVPQKYKDDIEEFVKWKEQRGLETDVKVAEEIATPITAEAIQKFVKEEYQKEGNNLTYVLLIGDHKDIPAKILPGIKSDQVYGQIVGNDHYNEVFIGRFSCESKEDLKTQIDRTIHYERNITTEDKWLGQALCIASNEGAGGQGDNGESDIQHQNVIANLLTKYGYTKIIKCYDPGVKPQNIIDAFNGGISLANYTGHGSDTFWVTSHFGVQHMKDLTNYNQLPFIFDVACVNGNFLFKTCFAEALMRAQKDGKPKGTVAIIASTINQSWASPMRGQDEMNSILCEQYPSNIKRTFGGVTMNGMFAMVEKYKKDGENMLDTWTVFGDPSLLVRTLVPTEMQVTAPANISPSAQTFEVACDYDGAIATLSDDGDMVGTAKVKDGKAIIKIDEDISDETKLTLTVVGYNKVTVIKEVKVQGTSVANVANDKPYTVAVSGKTITVESPAAELTIFDMNGRRVAAAKNGMVFEAQNGVYAVRIAAEGKRYTEKVIVK

SEQ ID NO: 318 - protein, 713 aa, Porphyromonas gulae
MRKLLLLIAASLLGVGLYAQNAKIKLDAPTTRATCTNNSFKQFDASFSFNEVELTKVETKGGTFASVSIPGAFPTGEIGSPEVPAVRKLIAVPVGATPIVRVKNFTEQVYSLNQYGSEKLMPHQPSMSKSDDPEKVPFVYNAAAYARKGFVGQELTQVEVLGTMRGVRVAALTINPVQYDAAANQLKVRNNIEIEVSFQGADEVATQRLYDASYSPYFETAYKQLFNKDVYTDHPDLYKTPARMLVVAGAKFKEALKPWLTWKAQKGFYLDVHYTDEAEVGTTNASIKAFIHKKYNDGLAANAAPVFLALIGDTDVISGEKGKKTKEVTDLYYSAVDGDYFPEMYSFRMSASSGEELKNIIDKVLMYEKATMPDKSYLEKVLLIAGADYNWNPKVGQQTIKYGMQYYFNQEHGYTDVYSYLKAPYTGCYSHLNTGVSFVNYTAHGSETSWADPSLTTSQLKALTNKDKYFLAIGNCCITAQFDYPQPCFGEVITRVKEKGAYAYIGSSPSSYWGEDYYWSVGANAVFGVQPTYEGTTMGSYDATFLEDSYNTVNSIMWAGNLAATHAGNIGNITHIGAHYYWEAYHVLGDGSVMPYRAMPKTNTYTLPASLPQNQATYSIQASAGSYVAISKDGVLYGTGVANASGVATVNMTKLITENGNYDVVITRSNYLPVIKQVQAGEPSPYEPVSNLSATVEGQKVTLKWDAPAAGNR

SEQ ID NO: 319 - protein, 736 aa, Porphyromonas gulae
MKKNFNRIVSIVAFSSLLGGMVFAQPAERGRNPQVRLLSAERSMSKVQFRMDNLQLTDVQTAQGVAQVPTFTEGVNISEKGMPTLPILSRSLAVSETRAMKVEVVSSKFIEKKNVLIAPSKGVISRAENPDQIPYVYGQSYNEDKFFPGEIATLSDPFILRDVRGQVVNFAPLQYNPVTKTLRIYTEIVVAVSETAEAGQNAISLVKNSTFTGFEDIYKSVFMNYEATRYTPVEEKENGRMIVIVPQKYKDDIEEFVKWKEQRGLETDVKVAEEIATPITAEAIQKFVKEEYQKEGNNLTYVLLIGDHKDIPAKILPGIKSDQVYGQIVGNDHYNEVFIGRFSCESKEDLKTQIDRTIHYERNITTEDKWLGQALCIASNEGAGGQGDNGESDIQHQNVIANLLTKYGYTKIIKCYDPGVKPQNIIDAFNGGISLANYTGHGSDTFWVTSHFGVQHMKDLTNYNQLPFIFDVACVNGNFLFKTCFAEALMRAQKDGKPKGTVAIIASTINQSWASPMRGQDEMNSILCEQYPSNIKRTFGGVTMNGMFAMVEKYKKDGENMLDTWTVFGDPSLLVRTLVPTEMQVTAPANISPSAQTFEVACDYDGAIATLSDDGDMVGTAKVKDGKAIIKIDEDISDETKLTLTVVGYNKVTVIKEVKVQGTSVANVANDKPYTVAVSGKTITVESPAAELTIFDMNGRRVAAAKNRLVFEAQNGVYAVRIAAEGKTYTEKVVVK

SEQ ID NO: 320 - protein, 656 aa, Porphyromonas gulae
MKKLNKFVSIALCSSLLGGMAFAQEAELGRNPNVRLLESAQQSVTKVQFRMDNLKFTEVQTPKGMAQVPTYTEGVNLSEKGMPTLPILSRSLAVSDTREMKVEVISSKFIEKKNVLIAPSKGMIMRNEDPNKIPYVYGKSYSQDKFFPGEIATLDDPFIVRDVRGQVVTFAPLQYNPVTKTLRIYTEITVAVSETAQPGKNALKAKGTFAGFEDTYKRLFMNYEPGRYTPLEEKQDGRMIVIVPQEFKDDINDFVAWKNQRGLRTEVKVAEEIASPVTANAVRAFVKAEYEKPGNDLMYVLLIGDNKHIPAAQGAGGKSDQVFGQIVGNDHYNEIFIGRFSCESKADLKTQIDRTIHYERDVKANEAWLGRALCIASSDGGSFADNGETDIQHETVIANLLESYGYTYISKRFGDYNVNANHIISDFNSGICTTNYTGHGSDTAWGTSGFNTTHMKQLANYNQLPYVFDVACVNGNFLASAPCFAEGLMRAQKDNKPTGAIAIIASTINQPWNPPMRGQDEMNEILCEKHTNNIKRTFGGITTNGIFGMLEKYKASAFATADTWTVFGDPSLLVRTLTPKTMTVTAPAQINLTDASVNVSCDFNGAIATISANGKMFGSAVVENGTATINLAGLTNESTVTLTVVGYNKETVVKAI

SEQ ID NO: 321 - protein, 713 aa, Porphyromonas gulae
MRKLLLLIAASLLGVGLYAQNAKIKLDAPTTRATCTNNSFKQFDASFSFNEVELTKVETKGGTFASVSIPGAFPTGEIGSPEVPAVRKLIAVPVGATPIVRVKNFTEQVYSLNQYGSEKLMPHQPSMSKSDDPEKVPFVYNAAAYARKGFVGQELTQVEVLGTMRGVRVAALTINPVQYDAAANQLKVRNNIEIEVSFQGADEVATQRLYDASYSPYFETAYKQLFNKDVYTDHPDLYKTPARMLVVAGAKFKEALKPWLTWKAQKGFYLDVHYTDEAEVGTTNASIKAFIHKKYNDGLAANAAPVFLALIGDTDVISGEKGKKTKEVTDLYYSAVDGDYFPEMYSFRMSASSGEELKNIIDKVLMYEKATMPDKSYLEKVLLIAGADYNWNPKVGQQTIKYGMQYYFNQEHGYTDVYSYLKAPYTGCYSHLNTGVSFVNYTAHGSETSWADPSLTTSQLKALTNKDKYFLAIGNCCITAQFDYPQPCFGEVITRVKEKGAYAYIGSSPSSYWGEDYYWSVGANAVFGVQPTYEGTTMGSYDATFLEDSYNTVNSIMWAGNLAATHAGNIGNITHIGAHYYWEAYHVLGDGSVMPYRAMPKTNTYTLPASLPQNQATYSIQASAGSYVAISKDGVLYGTGVANASGVATVNMTKLITENGNYDVVITRSNYLPVIKQVQAGEPSPYEPVSNLSATVEGQKVTLKWEAPAAGNR

SEQ ID NO: 322 - protein, 690 aa, Porphyromonas gulae
MKKLNKFVSIALCSSLLGGMAFAQEAELGRNPNVRLLESAQQSVTKVQFRMDNLKFTEVQTPKGMAQVPTYTEGVNLSEKGMPTLPILSRSLAVSDTREMKVEVISSKFIEKKNVLIAPSKGMIMRNEDPNKIPYVYGKSYSQDKFFPGEIATLDDPFIVRDVRGQVVTFAPLQYNPVTKTLRIYTEITVAVSETAQPGKNALKAKGTFAGFEDTYKRLFMNYEPGRYTPLEEKQDGRMIVIVPQEFKDDINDFVAWKNQRGLRTEVKVAEEIASPVTANAVRAFVKAEYEKPGNDLMYVLLIGDNKHIPAAQGAGGKSDQVFGQIVGNDHYNEIFIGRFSCESKADLKTQIDRTIHYERDVKANEAWLGRALCIASSDGGSFADNGETDIQHETVIANLLESYGYTYISKRFGDYNVNANHIISDFNSGICTTNYTGHGSDTAWGTSGFNTTHMKQLANYNQLPYVFDVACVNGNFLASAPCFAEGLMRAQKDNKPTGAIAIIASTINQPWNPPMRGQDEMNEILCEKHTNNIKRTFGGITTNGIFGMLEKYKASAFATADTWTVFGDPSLLVRTLTPKTMTVTAPAQINLTDASVNVSCDFNGAIATISANGKMFGSAVVENGTATINLAGLTNESTVTLTVVGYNKETVVKAISTNGEPSPYQPVSNLSATVEGQKVTLKWEAPAAG

SEQ ID NO: 323 - protein, 736 aa, Porphyromonas gulae
MKKNFNRIVSIVAFSSLLGGMVFAQPAERGRNPQVRLLSAERSMSKVQFRMDNLQLTDVQTAQGVAQVPTFTEGVNISEKGMPTLPILSRSLAVSETRAMKVEVVSSKFIEKKNVLIAPSKGVISRAENPDQIPYVYGQSYNEDKFFPGEIATLSDPFILRDVRGQVVNFAPLQYNPVTKTLRIYTEIVVAVSETAEAGQNAISLVKNSTFTGFEDIYKSVFMNYEATRYTPVEEKENGRMIVIVPQKYKDDIEEFVKWKEQRGLETDVKVAEEIATPITAEAIQKFVKEEYQKEGNNLTYVLLIGDHKDIPAKILPGIKSDQVYGQIVGNDHYNEVFIGRFSCESKEDLKTQIDRTIHYERNITTEDKWLGQALCIASDEGAGGQGDNGESDIQHQNVIANLLTKYGYTKIIKCYDPGVTPKHIIDAFNGGISLANYTGHGSDTFWVTSHFGVQHMKDLTNYNQLPFIFDVACVNGNFLFKTCFAEALMRAQKDGKPKGTVAIIASTINQSWASPMRGQDEMNSILCEQYPSNIKRTFGGVTMNGMFAMVEKYKKDGENMLDTWTVFGDPSLLVRTLVPTEMQVTAPANISPSAQTFEVACDYDGAIATLSDDGDMVGTAKVKDGKAIIKIDEDISDETKLTLTVVGYNKVTVIKEVKVQGTSVANVANDKPYTVAVSGKTITVESPAAELTIFDMNGRCVAAAKNRMVFEAQNGVYAVRIAAEGKRYTEKVIVK

SEQ ID NO: 324 - protein, 736 aa, Porphyromonas gulae
MKKNFNRIVSIVAFSSLLGGMVFAQPAERGRNPQVRLLSAERSMSKVQFRMDNLQLTDVQTAQGVAQVPTFTEGVNISEKGMPTLPILSRSLAVSETRAMKVEVVSSKFIEKKNVLIAPSKGVISRAENPDQIPYVYGQSYNEDKFFPGEIATLSDPFILRDVRGQVVNFAPLQYNPVTKTLRIYTEIVVAVSETAEAGQNAISLVKNSTFTGFEDIYKSVFMNYEATRYTPVEEKENGRMIVIVPQKYKDDIEEFVKWKEQRGLETDVKVAEEIATPITAEAIQKFVKEEYQKEGNNLTYVLLIGDHKDIPAKILPGIKSDQVYGQIVGNDHYNEVFIGRFSCESKEDLKTQIDRTIHYERNITTEDKWLGQALCIASNEGAGGQGDNGESDIQHQNVIANLLTKYGYTKIIKCYDPGVKPQNIIDAFNGGISLANYTGHGSDTFWVTSHFGVQHMKDLTNYNQLPFIFDVACVNGNFLFKTCFAEALMRAQKDGKPKGTVAIIASTINQSWASPMRGQDEMNSILCEQYPSNIKRTFGGVTMNGMFAMVEKYKKDGEEMLDTWTVFGDPSLLVRTLAPTQMQVTAPANISPSAQTFEVACDYDGAIATLSDDGDMVGTAKVKDGKAIIKIDEDISDETKLTLTVVGYNKVTVIKEVKVQGTSVANVANDKPYTVAVSGKTITVESPAAELTIFDMNGRRVAAAKNRLVFEAQNGVYAVRIAAEGKTYTEKVIVK

SEQ ID NO: 325 - protein, 689 aa, Porphyromonas gulae
MKKLNKFVSIALCSSLLGGMAFAQEAELGRNPNVRLLESAQQSVTKVQFRMDNLKFTEVQTPKGMAQVPTYTEGVNLSEKGMPTLPILSRSLAVSDTREMKVEVISSKFIEKKNVLIAPSKGMIMRNENPNKIPYVYGKSYSQDKFFPGEIATLDDPFIVRDVRGQVVTFAPLQYNPVTKTLRIYTEITVAVSETAQPGKNALKAKGTFAGFEDTYKRLFMNYEPGRYTPLEEKQDGRMIVIVPQEFKDDINDFVAWKNQRGLRTEVKVAEEIASPVTANAVRAFVKAEYEKPGNDLMYVLLIGDNKHIPAAQGAGGKSDQVFGQIVGNDHYNEIFIGRFSCESKADLKTQIDRTIHYERDVKANEAWLGRALCIASSDGGSFADNGETDIQHETVIANLLESYGYTYISKRFGDYNVNANHIISDFNSGICTTNYTGHGSDTAWGTSGFNTTHMKQLANYNQLPYVFDVACVNGNFLASAPCFAEGLMRAQKDNKPTGAIAIIASTINQPWNPPMRGQDEMNEILCEKHTNNIKRTFGGITTNGIFGMLEKYKASAFATADTWTVFGDPSLLVRTLTPKTMTVTAPAQINLTDASVNVSCDFNGAIATISANGKMFGSAVVENGTATINLAGLTNESTVTLTVVGYNKETVVKAISTNGEPSPYEPVSNLSATVEGQKVTLKWDAPAA

SEQ ID NO: 326 - protein, 1021 aa, Porphyromonas gulae
MKKLNKFVSIALCSSLLGGMAFAQEAELGRNPNVRLLESAQQSVTKVQFRMDNLKFTEVQTPKGMAQVPTYTEGVNLSEKGMPTLPILSRSLAVSDTREMKVEVISSKFIEKKNVLIAPSKGMIMRNENPNKIPYVYGKSYSQDKFFPGEIATLDDPFIVRDVRGQVVTFAPLQYNPVTKTLRIYTEITVAVSETAQLGKNALKAKGTFAGFEDTYKRLFMNYEPGRYTPLEEKQDGRMIVIVPQEFKDDINDFVAWKNQRGLRTEVKVAEEIASPVTANAVRAFVKAEYEKPGNDLMYVLLIGDNKHIPAAQGAGGKSDQVFGQIVGNDHYNEIFIGRFSCESKADLKTQIDRTIHYERDVKANEAWLGRALCIASSDGGSFADNGETDIQHETVIANLLESYGYTYISKRFGDYNVNANHIISDFNSGICTTNYTGHGSDTAWGTSGFNTTHMKQLANYNQLPYVFDVACVNGNFLASAPCFAEGLMRAQKDNKPTGAIAIIASTINQPWNPPMRGQDEMNEILCEKHTNNIKRTFGGITTNGIFGMLEKYKASAFATADTWTVFGDPSLLVRTLTPKTMTVTAPAQINLTDASVNVSCDFNGAIATISANGKMFGSAVVENGTATINLAGLTNESTVTLTVVGYNKETVVKAISTNGEPSPYQPVSNLSATVEGQKVTLKWDAPAAGNRAEVVNEGFESGIPSAWKTIDADGDGNNWDSAPIGESIPSAWKTIDADGDGNNWDSAPIGESFPGHNSVGCVSSASYINNVGPQTPDNYLITPELSLPSGGTLTFWVCAQDAAWAGEHYAVYASSTGNDAVNFTNALLEETLTAKSVVTSPEAIRGTRAQGTWYQKTVQLPAGTKYVAFRHFNCTDFFWLNLDDVVITSGNAPLYTYTIYRNNTQIASGVTETTYRDPDLAAGSYTYGVKVVYPNGESAIETTTLNITSLADVTVQKPYTLTVVGKTITVSCQGEAMIYDMNGRRLAAGRNTVVYTAQGGSYAVMVVVDGKSYVEKLAIK

SEQ ID NO: 327 - protein, 736 aa, Porphyromonas gulae
MKKNFNRIVSIVAFSSLLGGMVFAQPAERGRNPQVRLLSAERSMSKVQFRMDNLQLTDVQTAQGVAQVPTFTEGVNISEKGMPTLPILSRSLAVSETRAMKVEVVSSKFIEKKNVLIAPSKGVISRAENPDQIPYVYGQSYNEDKFFPGEIATLSDPFILRDVRGQVVNFAPLQYNPVTKTLRIYTEIVVAVSETAEAGQNAISLVKNSTFTGFEDIYKSVFMNYEATRYTPVEEKENGRMIVIVPQKYKDDIEEFVKWKEQRGLETDVKVAEEIATPITAEAIQKFVKEEYQKEGNNLTYVLLIGDHKDIPAKILPGIKSDQVYGQIVGNDHYNEVFIGRFSCESKEDLKTQIDRTIHYERNITTEDKWLGQALCIASDEGAGGQGDNGESDIQHQNVIANLLTKYGYTKIIKCYDPGVTPKHIIDAFNGGISLANYTGHGSDTFWVTSHFGVQHMKDLTNYNQLPFIFDVACVNGNFLFKTCFAEALMRAQKDGKPKGTVAIIASTINQSWASPMRGQDEMNSILCEQYPSNIKRTFGGVTMNGMFAMVEKYKKDGENMLDTWTVFGDPSLLVRTLVPTEMQVTAPANISPSAQTFEVACDYDGAIATLSDDGDMVGTAKVKDGKAIIKIDEDISDETKLTLTVVGYNKVTVIKEVKVQGTSVANVANDKPYTVAVSGKTITVESPAAELTIFDMNGRCVAAAKNGMVFEAQNGVYAVRIAAEGKRYTEKVIVK

SEQ ID NO: 328 - protein, 715 aa, Porphyromonas gulae
MRKLLLLIAASLLGVGLYAQNAKIKLDAPTTRATCTNNSFKQFDASFSFNEVELTKVETKGGTFASVSIPGAFPTGEIGSPEVPAVRKLIAVPVGATPIVRVKNFTEQVYSLNQYGSEKLMPHQPSMSKSDDPEKVPFVYNAAAYARKGFVGQELTQVEVLGTMRGVRVAALTINPVQYDAAANQLKVRNNIEIEVSFQGADEVATQRLYDASYSPYFETAYKQLFNKDVYTDHPDLYKTPARMLVVAGAKFKEALKPWLTWKAQKGFYLDVHYTDEAEVGTTNASIKAFIHKKYNDGLAANAAPVFLALIGDTDVISGEKGKKTKEVTDLYYSAVDGDYFPEMYSFRMSASSGEELKNIIDKVLMYEKATMPDKSYLEKVLLIAGADYNWNPKVGQQTIKYGMQYYFNQEHGYTDVYSYLKAPYTGCYSHLNTGVSFVNYTAHGSETSWADPSLTTSQLKALTNKDKYFLAIGNCCITAQFDYPQPCFGEVITRVKEKGAYAYIGSSPSSYWGEDYYWSVGANAVFGVQPTYEGTTMGSYDATFLEDSYNTVNSIMWAGNLAATHAGNIGNITHIGAHYYWEAYHVLGDGSVMPYRAMPKTNTYTLPASLPQNQATYSIQASAGSYVAISKDGVLYGTGVANASGVATVNMTKLITENGNYDVVITRSNYLPVIKQVQAGEPSPYQPVSNLSATVEGQKVTLKWEAPAAGNRAE

SEQ ID NO: 329 - protein, 692 aa, Porphyromonas gulae
  misc_feature (690)..(690): Xaa can be any naturally occurring amino acid
MKKLNKFVSIALCSSLLGGMAFAQEAELGRNPNVRLLESAQQSVTKVQFRMDNLKFTEVQTPKGMAQVPTYTEGVNLSEKGMPTLPILSRSLAVSDTREMKVEVISSKFIEKKNVLIAPSKGMIMRNEDPNKIPYVYGKSYSQDKFFPGEIATLDDPFIVRDVRGQVVTFAPLQYNPVTKTLRIYTEITVAVSETAQPGKNALKAKGTFAGFEDTYKRLFMNYEPGRYTPLEEKQDGRMIVIVPQEFKDDINDFVAWKNQRGLRTEVKVAEEIASPVTANAVRAFVKAEYEKPGNDLMYVLLIGDNKHIPAAQGAGGKSDQVFGQIVGNDHYNEIFIGRFSCESKADLKTQIDRTIHYERDVKANEAWLGRALCIASSDGGSFADNGETDIQHETVIANLLESYGYTYISKRFGDYNVNANHIISDFNSGICTTNYTGHGSDTAWGTSGFNTTHMKQLANYNQLPYVFDVACVNGNFLASAPCFAEGLMRAQKDNKPTGAIAIIASTINQPWNPPMRGQDEMNEILCEKHTNNIKRTFGGITTNGIFGMLEKYKASAFATADTWTVFGDPSLLVRTLTPKTMTVTAPAQINLTDASVNVSCDFNGAIATISANGKMFGSAVVENGTATINLAGLTNESTVTLTVVGYNKETVVKAISTNGEPSPYEPVSNLSATVEGQKVTLKWEAPAAXVS

SEQ ID NO: 330 - protein, 710 aa, Porphyromonas gulae
MRKLLLLIAASLLGVGLYAQNAKIKLDAPTTRATCTNNSFKQFDASFSFNEVELTKVETKGGTFASVSIPGAFPTGEIGSPEVPAVRKLIAVPVGATPIVRVKNFTEQVYSLNQYGSEKLMPHQPSMSKSDDPEKVPFVYNAAAYARKGFVGQELTQVEVLGTMRGVRVAALTINPVQYDAAANQLKVRNNIEIEVSFQGADEVATQRLYDASYSPYFETAYKQLFNKDVYTDHPDLYKTPARMLVVAGAKFKEALKPWLTWKAQKGFYLDVHYTDEAEVGTTNASIKAFIHKKYNDGLAANAAPVFLALIGDTDVISGEKGKKTKEVTDLYYSAVDGDYFPEMYSFRMSASSGEELKNIIDKVLMYEKATMPDKSYLEKVLLIAGADYNWNPKVGQQTIKYGMQYYFNQEHGYTDVYSYLKAPYTGCYSHLNTGVSFVNYTAHGSETSWADPSLTTSQLKALTNKDKYFLAIGNCCITAQFDYPQPCFGEVITRVKEKGAYAYIGSSPSSYWGEDYYWSVGANAVFGVQPTYEGTTMGSYDATFLEDSYNTVNSIMWAGNLAATHAGNIGNITHIGAHYYWEAYHVLGDGSVMPYRAMPKTNTYTLPASLPQNQATYSIQASAGSYVAISKDGVLYGTGVANASGVATVNMTKLITENGNYDVVITRSNYLPVIKQVQAGEPSPYEPVSNLSATVEGQKVTLKWEAPAA

SEQ ID NO: 331 - protein, 511 aa, Tannerella sp. 6_1_58FAA_CT1
MSCLLHAQMLVVCAPEYMEEMKPFVTWKIQKGIPTQMVSMSEIGETYEDLGDYVKNYYQTHHNRYLLLVGDANQVPINYLPGYDVTPFTPYTDAEYGYVSGTYPPEVLVGRLSAETADDVKVQVEKIIFYEKNVDENASWLSQCVGIADPLATDKGDNDETDIQHIRQVNSILEQYGYTAHETSTKKELTDLLNAGCGIVNYAGHGFMSGWATSDFSVSDVAALSNEGKFPVIISTGCDNGKFATGTCFAESFLRARNSAGDPIGAVGMLGFSAQVTWNPPMLGQDEMVRIMTSPDIPDSRKTFGEVANEAYRKVIEKYRGSGEDAAKEWILFGDPSMVLRTRTPGKMVVSHIEAADNGITSLSVSCDKDGAVVALSEGNNLLAVQTVEKGKAMLDFPAVTGDKILTVTVTAFDKVTYMGQVVIGDGSGLGVADSDASVTIYPNPSRGEIRIDGLSASSAFISIYSLDGSLIRKAEVDPNTSIPLNVEPGTYFLHLQSDGRYIVRRILVTE

SEQ ID NO: 332 - protein, 571 aa, Bacteroidetes oral taxon 274
MSTYKKFGLLILLSLLTMGVFAQELVRVSNNINEVRVIEEDNNGLLLNVEIGSYVKNDVSINGKTYYSITNDEGSLIYEKGYPDLPKITKSIAIPNNRGVKVSVVSFKLQDYKMEVAPSKGILDRTVNPNNVPYEFAKVYSTDEFYPKSYYSLGEPYLLHNQRGITIDFYPFVYNPITHTLRVVSSMVIKVEFEGQDTRNSTSKPKDSNRYFDAIYKEHFINSSTLKENRHNYGNEKMLIISKKDFMDEMQPFVEHKKRIGLKTEMVAVEDIGNNSDKIKEFIKSKYEADNKLTFILLVGDYKQVTTPFSGGGGSDPSYSLISGNDNYPDVMIGRFSAETEQEVTNMVNKTIKYETAKKNNETWFKKGLGIASNDGNGGGDDNEYDWEHLRKIRKELLKWKYTSIAELYDGSHGEEDAPGDPNPSMVAKVVNDGVSIINYTGHGSETSWVTTGFSNSGVKALTNANKLPFIFSVACVNGNFTSYTCFAEVWLRANKNNEPTGAIGFYGSSINQSWQPPMEAQDKFNELFYTEKFTTFGQLCFKGSCSMIDKYKSGGVAMFKTWIYFGDPSV

SEQ ID NO: 333 - protein, 1723 aa, Porphyromonas gulae
MRKLLLLIAASLLGVGLYAQNAKIKLDAPTTRTTCTNNSFKQFDASFSFNEVELTKVETKGGTFASVSIPGAFPTGEVGSPEVPAVRKLIAVPVGATPVVRVKSFTEQVYSLNQYGSEKLMPHQPSMSKSDDPEKVPFAYNAAAYARKGFVGQELTQVEMLGTMRGVRIAALTINPVQYDVVANQLKVRNNIEIEVSFQGADEVATQRLYDASFSPYFETAYKQLFNRDVYTDHGDLYNTPVRMLVVAGAKFKEALKPWLTWKAQKGFYLDVHYTDEAEVGTTNASIKAFIHKKYNDGLAASAAPVFLALVGDTDVISGEKGKKTKKVTDLYYSAVDGDYFPEMYTFRMSASSPEELTNIIDKVLMYEKATMPDKSYLEKALLIAGADSYWNPKIGQQTIKYAVQYYYNQDHGYTDVYSYPKAPYTGCYSHLNTGVGFANYTAHGSETSWADPSVTATQVKALTNKNKYFLAIGNCCVTAQFDYPQPCFGEVMTRVKEKGAYAYIGSSPNSYWGEDYYWSVGANAVFGVQPTFEGTSMGSYDATFLEDSYNTVNSIMWAGNLAATHAENIGNVTHIGAHYYWEAYHVLGDGSVMPYRAMPKTNTYTLPASLPQNQASYSIQASAGSYVAISKDGVLYGTGVANASGVATVNMTKQITENGNYDVVITRSNYLPVIKQIQAGEPSPYQPVSNLTATTQGQKVTLKWDAPSAKKAEGSREVKRIGDGLFVTIEPANDVRANEAKVVLAADNVWGDNTGYQFLLDADHNTFGSVIPATGPLFTGTASSNLYSANFEYLIPANADPVVTTQNIIVTGQGEVVIPGGVYDYCITNPEPASGKMWIAGDGGNQPARYDDFTFEAGKKYTFTMRRAGMGDGTDMEVEDDSPASYTYTVYRDGTKIKEGLTATTFEEDGVAAGNHEYCVEVKYTAGVSPKVCKDVTVEGSNEFAPVQNLTGSAVGQKVTLKWDAPNGTPNPNPNPNPGTTTLSESFENGIPASWKTIDADGDGHGWKPGNAPGIAGYNSNGCVYSESFGLGGIGVLTPDNYLITPALDLPNGGKLTFWVCAQDANYASEHYAVYASSTGNDASNFTNALLEETITAKGVRSPEAIRGRIQGTWRQKTVDLPAGTKYVAFRHFQSTDMFYIDLDEVEIKANGKRADFTETFESSTHGEAPAEWTTIDADGDGQGWLCLSSGQLDWLTAHGGTNVVASFSWNGMALNPDNYLISKDVTGATKVKYYYAVNDGFPGDHYAVMISKTGTNAGDFTVVFEETPNGINKGGARFGLSTEADGAKPQSVWIERTVDLPAGTKYVAFRHYNCSDLNYILLDDIQFTMGGSPTPTDYTYTVYRDGTKIKEGLTETTFEEDGVATGNHEYCVEVKYTAGVSPKKCVNVTINPTQFNPVKNLKAQPDGGDVVLKWEAPSAKKAEGSREVKRIGDGLFVTIEPANDVRANEAKVVLAADNVWGDNTGYQFLLDADHNTFGSVIPATGPLFTGTASSNLYSANFEYLIPANADPVVTTQNIIVTGQGEVVIPGGVYDYCITNPEPASGKMWIAGDGGNQPARYDDFTFEAGKKYTFTMRRAGMGDGTDMEVEDDSPASYTYTVYRDGTKIKEGLTETTYRDAGMSAQSHEYCVEVKYAAGVSPKVCVDYIPDGVADVTAQKPYTLTVVGKTITVTCQGEAMIYDMNGRRLAAGRNTVVYTAQGGYYAVMVVVDGKSYVEKLAVK

SEQ ID NO: 334 - protein, 1732 aa, Porphyromonas gulae
MRKLLLLIAASLLGVGLYAQSAKIKLDAPTTRTTCTNNSFKQFDASFSFNEVELTKVETKGGTFASVSIPGAFPTGEVGSPEVPAVRKLIAVPVGATPVVRVKSFTEQVYSLNQYGSEKLMPHQPSMSKSDDPEKVPFVYNAAAYARKGFVGQELTQVEMLGTMRGVRIAALTINPVQYDVVANQLKVRNNIEIEVSFQGADEVATQRLYDASFSPYFETAYKQLFNRDVYTDHGDLYNTPVRMLVVAGAKFKEALKPWLTWKAQKGFYLDVHYTDEAEVGTTNASIKAFIHKKYNDGLAASAAPVFLALVGDTDVISGEKGKKTKKVTDLYYSAVDGDYFPEMYTFRMSASSPEELTNIIDKVLMYEKATMPDKSYLEKVLLIAGADYSWNSQVGQPTIKYGMQYYYNQEHGYTDVYNYLKAPYTGCYSHLNTGVSFANYTAHGSETAWADPLLTTSQLKALTNKDKYFLAIGNCCITAQFDYVQPCFGEVITRVKEKGAYAYIGSSPNSYWGEDYYWSVGANAVFGVQPTFEGTSMGSYDATFLEDSYNTVNSIMWAGNLAATHAGNIGNITHIGAHYYWEAYHVLGDGSVMPYRAMPKTNTYTLPASLPQNQASYSIQASAGSYVAISKDGVLYGTGVANASGVATVSMTKQITENGNYDVVITRSNYLPVIKQIQVGEPSPYQPVSNLTATTQGQKVTLKWEAPSAKKAEGSREVKRIGDGLFVTIEPANDVRANEAKVVLAADNVWGDNTGYQFLLDADHNTFGSVIPATGPLFTGTASSNLYSANFEYLVPANADPVVTTQNIIVTGQGEVVIPGGVYDYCITNPEPASGKMWIAGDGGNQPARYDDFTFEAGKKYTFTMRRAGMGDGTDMEVEDDSPASYTYTVYRDGTKIKEGLTATTFEEDGVAAGNHEYCVEVKYTAGVSPKVCKDVTVEGSNEFAPVQNLTGSSVGQKVTLKWDAPNGTPNPNPNPNPNPGTTLSESFENGIPASWKTIDADGDGHGWKPGNAPGIAGYNSNGCVYSESFGLGGIGVLTPDNYLITPALDLPNGGKLTFWVCAQDANYASEHYAVYASSTGNDASNFTNALLEETITAKGVRSPKAIRGRIQGTWRQKTVDLPAGTKYVAFRHFQSTDMFYIDLDEVEIKANGKRADFTETFESSTHGEAPAEWTTIDADGDGQGWLCLSSGQLDWLTAHGGSNVVSSFSWNGMALNPDNYLISKDVTGATKVKYYYAVNDGFPGDHYAVMISKTGTNAGDFTVVFEETPNGINKGGARFGLSTEANGAKPQSVWIERTVDLPAGTKYVAFRHYNCSDLNYILLDDIQFTMGGSPTPTDYTYTVYRDGTKIKEGLTETTFEEDGVATGNHEYCVEVKYTAGVSPKKCVDVTVNSTQFNPVQNLTAEQAPNSMDAILKWNAPASKRAEVLNEDFENGIPASWKTIDADGDGNNWTTTPPPGGSSFAGHNSAICVSSASHINFEGPQNPDNYLVTPELSLPGGGTLTFWVCAQDANYASEHYAVYASSTGNDASNFANALLEEVLTAKTVVTAPEAIRGTRAQGTWYQKTVQLPAGTKYVAFRHFGCTDFFWINLDDVVITSGNAPSYTYTIYRNNTQIASGVTETTYRDPDLATGFYTYGVKVVYPNGESAIETATLNITSLADVTAQKPYTLTVVGKTITVTCQGEAMIYDMNGRRLAAGRNTVVYTAQGGHYAVMVVVDGKSYVEKLAVK

SEQ ID NO: 335 - protein, 626 aa, Marinimicrobia bacterium SCGC AB-629-J13
DRTVIEYSFGEFQKTDVVINGENYAILNLGKEVNIQEKGFPALPKITRSIIIPDDKKMEINVLESEFTEYSFKIASGKGIIVRPKTPSDVPYTFSDIYQQNEYYPGNLSELGEPYILRDFRGLTVTVYPFQYNPVTQSLKVYHHLILEVIPSGTGELNIKNRAVNGYNINFESLYASHFINHNPLLYNTVEERGRMIVISYGDFMDAIQPFVDWKNQKGIQCDLYDVYDLGANATGIKNFIQQEYDSSDDLCFVQLVGDHAQVPTIIVSNGGGGGSDPSFSLLEGNDDYPEIFVGRFSASSISQLETQVERSIHYERDIIEGSWLHKGVGIGSNQGPGDDGEYDNEHLDVIREHLLDYTYSEVGQIYDPSGTDQQGISAINDGRSIINYTGHGSVTSWGNGASLNINQVNDLENDWELPHVISVGCVNGSFENNTCFAEAWMRATNNNSGAPTGSVAFYGSTVNQYWNQPMRAQDHAMDLLVGYDYSINQSILQKYTIGGLWYNGSCNMMDVYGSSGIDMFLTWIIFGDASLVIRTNIPEPINVSHTGTLLIGTNTYSVSTGFSDALVALSDDGELLASGYTDASGSVTLELMNPPSEPSEITLTVTAYDRTTNIQPVTVIIPDGP

SEQ ID NO: 336 - protein, 649 aa, Marinimicrobia bacterium SCGC AB-629-J13
MKKIFLLVLTISFLFAEEKVIVGNNNFGVQLISSNINRTILEFNGGDFTKSSIIIEGKEFFHLNFQGEPTLLVKGNPQLPKMVRSIIISDNAKMKLKILETEYTEFDLTVAPSKGSITRDINPETIPYTFSDVYKTNEFYPQTVGVLSDPYIMRDIRGMTVTAYPFRYNPISNILRVYTKIVVEIIENGVDDQNVKTRQTEGINKHFSQLYSEHFINYDMIRYDTVEERGRMIVIAYGDFMGAVQPYVDWKNQKGIQTDLYDVYEMGANSTGIKNFIQAEYDSDTDLCFVQLVGDHAQVPTIMVSNGGGGGSDPSFALLEGNDSYPEIFVGRFSASSLAHVQTQVERTIHYERDITGGSWLHKGSGIASNQGPGDDGEYDNQHSDEIREKLLNYNYTEIDQIYDPSGTDQQGINAINEGRGIINYTGHGSETSWGNGASLNNSQVNSLTNDWMLPHVISVGCVNGAFENTTCFGETWLRATNNSNGDPTGAVAFYASTVNQYWNEPMRAQDHAMDILVGHNYSNNQPLDKKFTMGGLWYNGSCNMMDVYGQSGIDMFLTWIIFGDASLDIRSDIPSPISSSHSGTLFIGDEGYEVITNVPDVLVAISDNGILIGSGYTDEFGDIVIVLSPPPNEPAELTLTITGYNRLT

SEQ ID NO: 337 - protein, 422 aa, Porphyromonas gingivalis ATCC 33277
MFMNYTPVEEKQNGRMIVIVAKKYEGDIKDFVDWKNQRGLRTEVKVAEDIASPVTANAIQQFVKQEYEKEGNDLTYVLLIGDHKDIPAKITPGIKSDQVYGQIVGNDHYNEVFIGRFSCESKEDLKTQIDRTIHYERNITRKTMARSGSLIASHEGGPSADNGGSDIQHENIIANLLTQYGYTKIIKCYDPGVTPKNIIDAFNGGISLVNYTAGHGSDTAWGTSHFGTTHVKQLTNSNQLPFIFDVACVNGDFLFSMPCFAEALMRAQKDGKPTGTVAIIASTINQSWASPMRGQDEMNEILCEKHPNNIKRTFGGVTMNGMFAMVEKYKKDGEKMLDTWTVFGDPSLLVRTLVPTKMQVTAPAQINLTDASVNVSCDYNGAIATISANGKMFGSAVVENGTATINLTGLTNESTLTLTVVG

SEQ ID NO: 338 - protein, 1706 aa, Porphyromonas gingivalis
MKNLNKFVSIALCSSLLGGMAFAQQTELGRNPNVRLLESTQQSVTKVQFRMDNLKFTEVQTPKGMAQVPTYTEGVNLSEKGMPTLPILSRSLAVSDTREMKVEVVSSKFIEKKNVLIAPSKGMIMRNEDPKKIPYVYGKSYSQNKFFPGEIATLDDPFILRDVRGQVVNFAPLQYNPVTKTLRIYTEITVAVSETSEQGKNILNKKGTFAGFEDTYKRMFMNYEPGRYTPVEEKQNGRMIVIVAKKYEGDIKDFVDWKNQRGLRTEVKVAEDIASPVTANAIQQFVKQEYEKEGNDLTYVLLVGDHKDIPAKITPGIKSDQVYGQIVGNDHYNEVFIGRFSCESKEDLKTQIDRTIHYERNITTEDKWLGQALCIASAEGGPSADNGESDIQHENVIANLLTQYGYTKIIKCYDPGVTPKNIIDAFNGGISLVNYTGHGSETAWGTSHFGTTHVKQLTNSNQLPFIFDVACVNGDFLFSMPCFAEALMRAQKDGKPTGTVAIIASTINQSWASPMRGQDEMNEILCEKHPNNIKRTFGGVTMNGMFAMVEKYKKDGEKMLDTWTVFGDPSLLVRTLVPTKMQVTAPAQINLTDASVNVSCDYNGAIATISANGKMFGSAVVENGTATINLTGLTNESTLTLTVVGYNKETVIKTINTNGEPNPYQPVSNLTATTQGQKVTLKWDAPSTKTNATTNTARSVDGIRELVLLSVSDAPELLRSGQAEIVLEAHDVWNDGSGYQILLDADHDQYGQVIPSDTHTLWPNCSVPANLFAPFEYTVPENADPSCSPTNMIMDGTASVNIPAGTYDFAIAAPQANAKIWIAGQGPTKEDDYVFEAGKKYHFLMKKMGSGDGTELTISEGGGSDYTYTVYRDGTKIKEGLTATTFEEDGVATGNHEYCVEVKYTAGVSPKVCKDVTVEGSNEFAPVQNLTGSAVGQKVTLKWDAPNGTPNPNPNPNPNPNPGTTTLSESFENGIPASWKTIDADGDGHGWKPGNAPGIAGYNSNGCVYSESFGLGGIGVLTPDNYLITPALDLPNGGKLTFWVCAQDANYASEHYAVYASSTGNDASNFTNALLEETITAKGVRSPEAIRGRIQGTWRQKTVDLPAGTKYVAFRHFQSTDMFYIDLDEVEIKANGKRADFTETFESSTHGEAPAEWTTIDADGDGQGWLCLSSGQLDWLTAHGGTNVVASFSWNGMALNPDNYLISKDVTGATKVKYYYAVNDGFPGDHYAVMISKTGTNAGDFTVVFEETPNGINKGGARFGLSTEANGAKPQSVWIERTVDLPAGTKYVAFRHYNCSDLNYILLDDIQFTMGGSPTPTDYTYTVYRDGTKIKEGLTETTFEEDGVATGNHEYCVEVKYTAGVSPKECVNVTINPTQFNPVKNLKAQPDGGDVVLKWEAPSAKKTEGSREVKRIGDGLFVTIEPANDVRANEAKVVLAADNVWGDNTGYQFLLDADHNTFGSVIPATGPLFTGTASSNLYSANFEYLIPANADPVVTTQNIIVTGQGEVVIPGGVYDYCITNPEPASGKMWIAGDGGNQPARYDDFTFEAGKKYTFTMRRAGMGDGTDMEVEDDSPASYTYTVYRDGTKIKEGLTETTYRDAGMSAQSHEYCVEVKYAAGVSPKVCVDYIPDGVADVTAQKPYTLTVVGKTITVTCQGEAMIYDMNGRRLAAGRNTVVYTAQGGYYAVMVVVDGKSYVEKLAVK

SEQ ID NO: 339 - protein, 1731 aa, Porphyromonas gingivalis
MRKLLLLIAASLLGVGLYAQSAKIKLDAPTTRTTCTNNSFKQFDASFSFNEVELTKVETKGGTFASVSIPGAFPTGEVGSPEVPAVRKLIAVPVGATPVVRVKSFTEQVYSLNQYGSEKLMPHQPSMSKSDDPEKVPFVYNAAAYARKGFVGQELTQVEMLGTMRGVRIAALTINPVQYDVVANQLKVRNNIEIEVSFQGADEVATQRLYDASFSPYFETAYKQLFNRDVYTDHGDLYNTPVRMLVVAGAKFKEALKPWLTWKAQKGFYLDVHYTDEAEVGTTNASIKAFIHKKYNDGLAASAAPVFLALVGDTDVISGEKGKKTKKVTDLYYSAVDGDYFPEMYTFRMSASSPEELTNIIDKVLMYEKATMPDKSYLEKVLLIAGADYSWNSQVGQPTIKYGMQYYYNQEHGYTDVYNYLKAPYTGCYSHLNTGVSFANYTAHGSETAWADPLLTTSQLKALTNKDKYFLAIGNCCITAQFDYVQPCFGEVITRVKEKGAYAYIGSSPNSYWGEDYYWSVGANAVFGVQPTFEGTSMGSYDATFLEDSYNTVNSIMWAGNLAATHAGNIGNITHIGAHYYWEAYHVLGDGSVMPYRAMPKTNTYTLPASLPQNQASYSIQASAGSYVAISKDGVLYGTGVANASGVATVSMTKQITENGNYDVVITRSNYLPVIKQIQVGEPSPYQPVSNLTATTQGQKVTLKWEAPSAKKAEGSREVKRIGDGLFVTIEPANDVRANEAKVVLAADNVWGDNTGYQFLLDADHNTFGSVIPATGPLFTGTASSNLYSANFEYLIPANADPVVTTQNIIVTGQGEVVIPGGVYDYCITNPEPASGKMWIAGDGGNQPARYDDFTFEAGKKYTFTMRRAGMGDGTDMEVEDDSPASYTYTVYRDGTKIKEGLTATTFEEDGVAAGNHEYCVEVKYTAGVSPKVCKDVTVEGSNEFAPVQNLTGSSVGQKVTLKWDAPNGTPNPNPNPNPNPGTTLSESFENGIPASWKTIDADGDGHGWKPGNAPGIAGYNSNGCVYSESFGLGGIGVLTPDNYLITPALDLPNGGKLTFWVCAQDANYASEHYAVYASSTGNDASNFTNALLEETITAKGVRSPKAIRGRIQGTWRQKTVDLPAGTKYVAFRHFQSTDMFYIDLDEVEIKANGKRADFTETFESSTHGEAPAEWTTIDADGDGQGWLCLSSGQLDWLTAHGGSNVVSSFSWNGMALNPDNYLISKDVTGATKVKYYYAVNDGFPGDHYAVMISKTGTNAGDFTVVFEETPNGINKGGARFGLSTEANGAKPQSVWIERTVDLPAGTKYVAFRHYNCSDLNYILLDDIQFTMGGSPTPTDYTYTVYRDGTKIKEGLTETTFEEDGVATGNHEYCVEVKYTAGVSPKKCVNVTVNSTQFNPVQNLTAEQAPNSMDAILKWNAPASKRAEVLNEDFENGIPASWKTIDADGDGNNWTTTPPPGGSSFAGHNSAICVSSASYINFEGPQNDNYLVTPELSLPGGGTLTFWVCAQDANYASEHYAVYASSTGNDASNFANALLEEVLTAKTVVTAPEAIRGTRAQGTWYQKTVQLPAGTKYVAFRHFGCTDFFWINLDDVVITSGNAPSYTYTIYRNNTQIASGVTETTYRDPDLATGFYTYGVKVVYPNGESAIETATLNITSLADVTAQKPYTLTVVGKTITVTCQGEAMIYDMNGRRLAAGRNTVVYTAQGGHYAVMVVVDGKSYVEKLAVK

SEQ ID NO: 340 - protein, 1702 aa, Porphyromonas gingivalis
MKNLNKFVSIALCSSLLGGMAFAQQTELGRNPNVRLLESTQQSVTKVQFRMDNLKFTEVQTPKGMAQVPTYTEGVNLSEKGMPTLPILSRSLAVSDTREMKVEVVSSKFIEKKNVLIAPSKGMIMRNEDPKKIPYVYGKSYSQNKFFPGEIATLDDPFILRDVRGQVVNFAPLQYNPVTKTLRIYTEITVAVSETSEQGKNILNKKGTFAGFEDTYKRMFMNYEPGRYTPVEEKQNGRMIVIVAKKYEGDIKDFVDWKNQRGLRTEVKVAEDIASPVTANAIQQFVKQEYEKEGNDLTYVLLIGDHKDIPAKITPGIKSDQVYGQIVGNDHYNEVFIGRFSCESKEDLKTQIDRTIHYERNITTEDKWLGQALCIASAEGGPSADNGESDIQHENVIANLLTQYGYTKIIKCYDPGVTPKNIIDAFNGGISLANYTGHGSETAWGTSHFGTTHVKQLTNSNQLPFIFDVACVNGDFLFSMPCFAEALMRAQKDGKPTGTVAIIASTINQSWASPMRGQDEMNEILCEKHPNNIKRTFGGVTMNGMFAMVEKYKKDGEKMLDTWTVFGDPSLLVRTLVPTKMQVTAPAQINLTDASVNVSCDYNGAIATISANGKMFGSAVVENGTATINLTGLTNESTLTLTVVGYNKETVIKTINTNGEPSPYQPVSNLTATTQGQKVTLKWDAPSTKTNATTNTARSVDGIRELVFLSVSDAPELLRSGQAEIVLEAHDVWNDGSGYQILLDADHDQYGQVIPSDTHTLWPNCSVPANLFAPFEYTVPENADPSCSPTNMIMDGTASVNIPAGTYDFAIAAPQANAKIWIAGQGPTKEDDYVFEAGKKYHFLMKKMGSGDGTELTISEGGGSDYTYTVYRDGTKIKEGLTATTFEEDGVAAGNHEYCVEVKYTAGVSPKVCKDVTVEGSNEFAPVQNLTGSAVGQKVTLKWDAPNGTPNPNPNPNPGTTTLSESFENGIPASWKTIDADGDGHGWKPGNAPGIAGYNSNGCVYSESFGLGGIGVLTPDNYLITPALDLPNGGKLTFWVCAQDANYASEHYAVYASSTGNDASNFTNALLEETITAKGVRSPEAIRGRIQGTWRQKTVDLPAGTKYVAFRHFQSTDMFYIDLDEVEIKANGKRADFTETFESSTHGEAPAEWTTIDADGDGQGWLCLSSGQLDWLTAHGGTNVVASFSWNGMALNPDNYLISKDVTGATKVKYYYAVNDGFPGDHYAVMISKTGTNAGDFTVVFEETPNGINKGGARFGLSTEANGAKPQSVWIERTVDLPAGTKYVAFRHYNCSDLNYILLDDIQFTMGGSPTPTDYTYTVYRDGTKIKEGLTETTFEEDGVATGNHEYCVEVKYTAGVSPKKCVNVTVNSTQFNPVKNLKAQPDGGDVVLKWEAPSAKKTEGSREVKRIGDGLFVTIEPANDVRANEAKVVLAADNVWGDNTGYQFLLDADHNTFGSVIPATGPLFTGTASSNLYSANFEYLIPANADPVVTTQNIIVTGQGEVVIPGGVYDYCITNPEPASGKMWIAGDGGNQPARYDDFTFEAGKKYTFTMRRAGMGDGTDMEVEDDSPASYTYTVYRDGTKIKEGLTETTYRDAGMSAQSHEYCVEVKYAAGVSPKVCVDYIPDGVADVTAQKPYTLTVVGKTITVTCQGEAMIYDMNGRRLAAGRNTVVYTAQGGYYAVMVVVDGKSYVEKLAIK

SEQ ID NO: 341 - protein, 889 aa, Porphyromonas gingivalis
MRKLLLLIAASLLGVGLYAQSAKIKLDAPTTRTTCTNNSFKQFDASFSFNEVELTKVETKGGTFASVSIPGAFPTGEVGSPEVPAVRKLIAVPVGATPVVRVKSFTEQVYSLNQYGSEKLMPHQPSMSKSDDPEKVPFVYNAAAYARKGFVGQELTQVEMLGTMRGVRIAALTINPVQYDVVANQLKVRNNIEIEVSFQGADEVATQRLYDASFSPYFETAYKQLFNRDVYTDHGDLYNTPVRMLVVAGAKFKEALKPWLTWKAQKGFYLDVHYTDEAEVGTTNASIKAFIHKKYNDGLAASAAPVFLALVGDTDVISGEKGKKTKKVTDLYYSAVDGDYFPEMYTFRMSASSPEELTNIIDKVLMYEKATMPDKSYLEKVLLIAGADYSWNSQVGQPTIKYGMQYYYNQEHGYTDVYNYLKAPYTGCYSHLNTGVSFANYTAHGSETAWADPLLTTSQLKALTNKDKYFLAIGNCCITAQFDYVQPCFGEVITRVKEKGAYAYIGSSPNSYWGEDYYWSVGANAVFGVQPTFEGTSMGSYDATFLEDSYNTVNSIMWAGNLAATHAGNIGNITHIGAHYYWEAYHVLGDGSVMPYRAMPKTNTYTLPASLPQNQASYSIQASAGSYVAISKDGVLYGTGVANASGVATVSMTKQITENGNYDVVITRSNYLPVIKQIQVGEPSPYQPVSNLTATTQGQKVTLKWEAPSAKKAEGSREVKRIGDGLFVTIEPANDVRANEAKVVLAADNVWGDNTGYQFLLDADHNTFGSVIPATGPLFTGTASSNLYSANFEYLIPANADPVVTTQNIIVTGQGEVVIPGGVYDYCITNPEPASGKMWIAGDGGNQPARYDDFTFEAGKKYTFTMRRAGMGDGTDMEVEDDSPASYTY

SEQ ID NO: 342 - protein, 531 aa, Porphyromonas gingivalis
SHFGTTHVKQLTNSNQLPFIFDVACVNGDFLYNVPCFAEALMRAQKDGKPTGTVAIIASTINQSWASPMRGQDEMNEILCEKHPNNIKRTFGGVTMNGMFAMVEKYKKDGEKMLDTWTVFGDPSLLVRTLVPTKMQVTAPAQINLTDASVNVSCDYNGAIATISANGKMFGSAVVENGTATINLTGLTNESTLTLTVVGYNKETVIKTINTNGEPNPYQPVSNLTATTQGQKVTLKWDAPSTKTNATTNTARSVDGIRELVLLSVSDAPELLRSGQAEIVLEAHDVWNDGSGYQILLDADHDQYGQVIPSDTHTLWPNCSVPANLFAPFEYTVPENADPSCSPTNMIMDGTASVNIPAGTYDFAIAAPQANAKIWIAGQGPTKEDDYVFEAGKKYHFLMKKMGSGDGTELTISEGGGSDYTYTVYRDGTKIKEGLTATTFEEDGVAAGNHEYCVEVKYTAGVSPKVCKDVTVEGSNEFAPVQNLTGSAVGQKVTLKWDAPNGTPNPNPNPNPNPNPGTTTLSESFENGIPA

SEQ ID NO: 343 - protein, 438 aa, Porphyromonas gingivalis
DIEDFVDWKNQRGLRTEVKVAEDIASPVTANAIQQFVKQEYEKEGNDLTYVLLIGDHKDIPAKITPGIKSDQVYGQIVGNDHYNEVFIGRFSCESKEDLKTQIDRTIHYERNITTEDKWLGQALCIASAEGGPSADNGESDIQHENVIANLLTQYGYTKIIKCYDPGVTPKNIIDAFNGGISLVNYTGHGSETAWGTSHFGTTHVKQLTNSNQLPFIFDVACVNGDFLYNVPCFAEALMRAQKDGKPTGTVAIIASTINQYWAPPMRGQDEMNEILCEKHPNNIKRTFGGVTMNGMFAMVEKYKKDGENMLDTWTVFGDPSLLVRTLVPTKMQVTAPAQINLTDASVNVSCDYNGAIATISANGKMFGSAVVENGTATINLTGLTNESTLTLTVVGYNKETVIKTINTNGEPNPYQPVSNLTATTQGQKVTLKWDAPS

SEQ ID NO: 344 - protein, 939 aa, Porphyromonas gingivalis
MRKLLLLIAASLLGVGLYAQSAKIKLDAPTTRTTCTNNSFKQFDASFSFNEVELTKVETKGGTFASVSIPGAFPTGEVGSPEVPAVRKLIAVPVGATPVVRVKSFTEQVYSLNQYGSEKLMPHQPSMSKSDDPEKVPFVYNAAAYARKGFVGQELTQVEMLGTMRGVRIAALTINPVQYDVVANQLKVRNNIEIEVSFQGADEVATQRLYDASFSPYFETAYKQLFNRDVYTDHGDLYNTPVRMLVVAGAKFKEALKPWLTWKAQKGFYLDVHYTDEAEVGTTNASIKAFIHKKYNDGLAASAAPVFLALVGDTDVISGEKGKKTKKVTDLYYSAVDGDYFPEMYTFRMSASSPEELTNIIDKVLMYEKATMPDKSYLEKVLLIAGADYSWNSQVGQPTIKYGMQYYYNQEHGYTDVYNYLKAPYTGCYSHLNTGVSFANYTAHGSETAWADPLLTTSQLKALTNKDKYFLAIGNCCITAQFDYVQPCFGEVITRVKEKGAYAYIGSSPNSYWGEDYYWSVGANAVFGVQPTFEGTSMGSYDATFLEDSYNTVNSIMWAGNLAATHAGNIGNITHIGAHYYWEAYHVLGDGSVMPYRAMPKTNTYTLPASLPQNQASYSIQASAGSYVAISKDGVLYGTGVANASGVATVSMTKQITENGNYDVVITRSNYLPVIKQIQAGEPSPYQPVSNLTATTQGQKVTLKWDAPSAKKAEGSREVKRIGDGLFVTIEPANDVRANEAKVVLAADNVWGDNTGYQFLLDADHNTFGSVIPATGPLFTGTASSDLYSANFEYLIPANADPVVTTQNIIVTGQGEVVIPAGVYDYCITNPEPASGKMWIAGDGGNQPARYDDFTFEAGKKYTFTMRRAGMGDGTDMEVEDDSPASYTYTVYRDGTKIQEGLTATTFEEDGVAAGNHEYCVEVKYTAGVSPKVCKDVTV

SEQ ID NO: 345 - protein, 757 aa, Porphyromonas gingivalis
MRKLLLLIAASLLGVGLYAQNAKIKLDAPTTRTTCTNNSFKQFDASFSFNEVELTKVETKGGTFATVSIPGAFPTGEVGSPEVPAVRKLIAVPVGATPVVRVKSFTEQVYSLNQYGSEKLMPHQPSMSKSDDPEKVPFVYNAAAYARKGFVGQELTQVEMLGTMRGVRIAALTINPVQYDVVANQLKVRNNIEIEVSFQGADEVATQRLYDASFSPYFEAAYKQLFNRDVYTDHGDLYNTPVRMLVVAGAKFKEALKPWLTWKAQKGFYLDVHYTDEAEVGTTNASIKAFIHKKYNDGLAASAAPVFLALVGDTDVISGEKGKKTKKVTDLYYSAVDGDYFPEMYTFRMSASSPEELTNIIDKVLMYEKATMPDKSYLEKALLIAGADSYWNPKIGQQTIKYAVQYYYNQDHGYTDVYSYPKAPYTGCYSHLNTGVGFANYTAHGSETSWADPSLTATQVKALTNKDKYFLAIGNCCVTAQFDYPQPCFGEVITRVKEKGAYAYIGSSPNSYWGEDYYWSVGANAVFGVQPTFEGTSMGSYDATFLEDSYNTVNSIMWAGNLAATHAGNIGNITHIGAHYYWEAYHVLGDGSVMPYRAMPKTNTYTLPASLPQNQASYSIQASAGSYVAISKDGVLYGTGVANASGVATVNMTKQITENGNYDVVITRSNYLPVIKQIQAGEPSPYQPVSNLTATTQGQKVTLKWDAPSAKKAEASREVKRIGDGLFVTIEPANDVRANEAKVVLAADNVWGDNTGY

SEQ ID NO: 346 - protein, 525 aa, Coprobacter secundus
MKKAIKLFLYIILCFIPTVLSAQMLIVCAPEFADEMKPFIQWKTQKGMKVELITMDKIGSTAAELKNYVADYYKKNNNRYLLLVGDAEQIPVHFCYGITKPDPNTAYSDAEYGYISGDEYPPSVLVGRFSAKTTEDVRTQVERVIYYERDIDESATWLENSIGIADPSSNEKGDNDETDIQHIRTINDILKDNNYTTYEISKKNDLVEQLDKGCGIVNYTGHGYTESWATTGFSVNDVNKLTNINRLPFIIAAGCQNGHFRLGTCLSEAFLRGQTQEGKPVGAIGMLGFTIQIYWNPPMLGQDEFIKILTSDNSPKILGEVINSAYKKVIEVYKGSGSDAAKQWSLFGDPSLLLRRRTPQNMNIVYDKTLPVGTSSINIDCDTDGATVALSANDKLLDVKTVTDGQASLSFPEIEQDITLYVTITAQDKVTHQGKIIVGKGSGIEKNNINNSVLIYPNPSTGTITLSGISSLQEPVLALIYSPDGQLIKEIEIKENVPFALSVEPGTYFLQIPNKSLTRKIVVIH

SEQ ID NO: 347 - protein, 1263 aa, Candidatus Cloacimonas acidaminovorans
MKKISFILLLVFTTAILVAASGTIKLQDNPAKVQLLEKSDTGLSIAYAVDELQFREINTKEGIFTELNALNYTTTNVTGLPALPLMRQLISVPLGANVTANIVSSSAKVINLDEQGVLYPLMPRQESVSKSADLEQLPFEVNRDFYNANMWTDNPSITVTEIGMMRGTRIFAVDFVPIKYNPVLKKIEVIYQAEVKVAFSGANFIATNELQAKTYSPAFEGVFAQTLINYNAPKVSFLRYPIGYVIILPDNFIAPMQPFIDWKKQEGYNVIVAPTSITGTTTTSIKAYMQNLWNSATSENPAPSYLLIVGDVAQVPTNNGNAGSHPTDLTYVRLQGTDYMPEMYFGRFSATSVAEVTNQVNKTLMYEQYTMPSDAYLSEVVMIAGVDSYYSTTHANGQINYGTNNYFNPAHNITSHTYLYPASGSSASAIVQNASNGMGYINYTAHGDVTEWYNPNFSISNINSLQNTNKYSYVVGNCCLTSKFDNPICFAEAWLRATNKGAIIYIGGTNSTYWDEDYWWGVGYKPPVVGTGSPFVAGRTGAYDALFHDHNEPFADWAGNAGSNVVMGNMAVVQSNSSRINYYWEIYSIMGDPSLVPYLGIPAQNAYTPPAQMFLGFNSMDIQTDPYSYVALSMNNELHGVGLADASGNLTLNYTPFTEPGIAKLVITRSLRKPLIANIEIIPNEGPYVTVGPLELNDGNNNIAEAGDNINISLQFNNVGIETASNLTATLTCDSPYILLNNATIQLPDIASGNSINQTNAFQINILPDVPDQHLAGFNITVSDGEDTWVTQRSLTINAPNVVFGNHTLFDSNSDGIYQPGETVTISLSISNTGHMNVDGGSLAIVLSSPYAALDNYNFIIPPLTAGNGIPIVLHLFISQDCPNEEVIPIGFAMNAGIQLLNHSIMIPVGIIGESFESGDFTAFPWVNNSTIPWTIISGTSNAHFGNYAAKSGAIGNNGSTTLQITMEVPSAGNISFWRKVSSEANYDWLKFYIDNNETGSWSGEIGWSEVSYPVTAGSHIFKWTYSKDVGSVSGSDCAWLDDIRFPGMGVLETAIFYTTTTQIDFTDVLPNTTVSVDFALRNLGNIAMQGIITCPPNFELSQYGNALPANYTYQIEAGQTVIYTLSYIAGNSVSELQTNMQITTNDPHHPMVIIPVNLTPLANDDNVNIPYVTALHKNYPNPFNPETTIHYSLSEAGPVKIEVYNIKGQLVRNLVNERKTAGNYTVIWNGKDEQGKNVSSGIYFYRMQTKNYSSTQKMMLMK

SEQ ID NO: 348 - protein, 606 aa, Candidatus Cloacimonas acidaminovorans
LEYRISAFEKNMVTIEGEEWYQIRLPKEGITQDKGYPELPVFNRSIIIPDQALMAIEVFDLEFKDYPIKVAPSKGVITRDINPATIPYTFGNVYQENSFYPQKMVALSEPYILRDFRGITVLTTPFAYNPVTGTLRVYTSYKVKVYNQGNDTVNSFNRSRTSVSRSFCPLYENHFLNWNSYRYTPVDDSYGKLLVICHSSFLTQIAPYINWKRQKGIDTELVEFSTIGTTANQLKAYIQNRYNADNSITFVQLVGDAPQIPTLSYSGGGSDPSFSLVAGSDNYPDIFIGRFSAQTTAEVTAQVNKTIQYERDLNTSATWLSKAMGIASAEGTSGEGDNGESDITHMNLIRTKLLNYGYTSVDQIYDPGASASTVTTNVNAGRGFINYVGHGSNTSWGTTGFSNTNASALTNGNKVPFIMDVACVNGNFVSYTCFAEAWMRNANGGAVGIYASSINQSWASPMRAQDEVTDLLTGEVHTTLGGLYYNGSCKMMDVYGSDGVNMFKTWHIFGDASLQVRSKTPLAMTVSHPASVTSGTNNIIISSGVANALVAITYNNTIYGKAVTNSSGSAIVNISNPPSGEITYTVTVTAFNRVTYTGSLQQVNVP

SEQ ID NO: 349 - protein, 736 aa, Porphyromonas gulae
MKKNFNRIVSIVAFSSLLGGMAFAQPAERGRNPQVRLLSAERSMSKVQFRMDNLQFTDVQTAQGVAQVPTFTEGVNISEKGMPTLPILSRSLAVSETRAMKVEVVSSKFIEKKNVLIAPSKGVISRAENPDQIPYVYGQSYNEDKFFPGEIATLSDPFILRDVRGQVVNFAPLQYNPVTKTLRIYTEIVVAVSETAEAGQNAISLVKNSTFTGFEDIYKSVFMNYEATRYTPVEEKENGRMIVIVPQKYKDDIEEFVKWKEQRGLETDVKVAEEIATPITAEAIQKFVKEEYQKEGNNLTYVLLIGDHKDIPAKILPGIKSDQVYGQIVGNDHYNEVFIGRFSCESKEDLKTQIDRTIHYERNITTEDKWLGQALCIASNEGAGGQGDNGESDIQHQNVIANLLTKYGYTKIIKCYDPGVTPKHIIDAFNGGISLANYTGHGSDTFWVTSHFGVQHMKDLTNYNQLPFIFDVACVNGNFLFKTCFAEALMRAQKDGKPKGTVAIIASTINQSWASPMRGQDEMNSILCEQYPSNIKRTFGGVTMNGMFAMVEKYKKDGENMLDTWTVFGDPSLLVRTLAPTQMQVTAPANISPSAQTFEVACDYDGAIATLSDDGDMVGTAKVKDGKAIIKIDEDISDETKLTLTVVGYNKVTVIKEVKVQGTSVANVANDKPYTVAVSGKTITVESPAAELTIFDMNGRRVAAAKNRLVFEAQNGVYAVRIAAEGKTYTEKVVVK

What is claimed is:

1. A composition for reducing or eliminating oral health compromising (OHC) microorganisms, comprising:
a. a safe and effective amount of an antimicrobial IgY antibody, produced in the egg of an avian animal;
b. a veterinarily or pharmaceutically acceptable vehicle or carrier; and
c. optionally comprising all the naturally-occurring components of said egg; and
wherein the IgY antibody was produced using, or raised against and reacts to, an immunogenic portion of any one or more of the polypeptide sequences as set forth in SEQ ID NOs: 110-113, 120, 123-125, 130-133, 135-138, 143-148, 221-224 or 227-349; or
wherein the IgY antibody was produced using, or raised against, a polypeptide comprising, consisting of or consisting essentially of one or more of the following: SEQ ID NO:221; residues 1-184 of SEQ ID NO:221; residues 1-290 of SEQ ID NO:221; residues 65-184 of SEQ ID NO:221; residues 65-290 of SEQ ID NO:221; residues 65-419 of SEQ ID NO:221; residues 192-290 of SEQ ID NO:221; residues 192-419 of SEQ ID NO:221; residues 147-419 of SEQ ID NO:221; SEQ ID NO:225; or SEQ ID NO:226; or
wherein the IgY antibody was produced using, or raised against, a polypeptide comprising, consisting of or consisting essentially of one or more of the following: residues 65-184 of SEQ ID NO:221; residues 65-290 of SEQ ID NO:221; or residues 192-290 of SEQ ID NO:221; or
wherein the IgY antibody was produced using, or raised against, a polypeptide comprising, consisting of or consisting essentially of one or more of the following: residues 65-184 of SEQ ID NO:221, residues 65-290 of SEQ ID NO:221 and residues 192-290 of SEQ ID NO:221; or
wherein the IgY antibody was produced using, or raised against, a polypeptide comprising, consisting of or consisting essentially of SEQ ID NO:222;
wherein the IgY antibody was produced using, or raised against, a polypeptide comprising, consisting of or consisting essentially of a sequence having greater than 60, 70, 80 or 90% identity to the sequence as set forth in SEQ ID NO:221, 222, 223 or 224.

2. The composition of claim 1, wherein the IgY antibody was produced using, or raised against, a polypeptide comprising, consisting of or consisting essentially of a sequence having greater than 60% identity to the sequence as set forth in SEQ ID NO:221, 222, 223 or 224.

3. The composition of claim 1, wherein the composition is formulated as a gel.

4. The composition of claim 1, wherein the composition is formulated as a soft chewable veterinary composition, wherein the carrier comprises one or more fillers, at least one flavoring agent, at least one binder, one or more solvents, one or more surfactants, at least one humectant, optionally an antioxidant, and optionally a preservative;
wherein the one or more fillers is soy protein fines, corn starch, or a mixture thereof;
wherein the binder is polyvinylpyrrolidone or a polyethylene glycol, or a combination thereof;
wherein the solvent is a liquid polyethylene glycol or a caprylic/capric triglyceride, or a combination thereof;
wherein the surfactant is polyethylene glycol hydroxystearate;
wherein the humectant is glycerin;
wherein the flavoring agent is an artificial meat or beef flavor.

5. The composition of claim 1, comprising:
a. a filler selected from corn starch, pre-gelatinized corn starch, corn gluten meal and soy protein fines, or a combination thereof;
b. a solvent selected from liquid polyethylene glycols, propylene glycol, propylene carbonate, caprylic/capric triglycerides, caprylic/capric/linoleic triglycerides, caprylic/capric/succinic triglycerides, propylene glycol dicaprylate/dicaprate, glycerol caprylate/caprate and polyglycolized glycerides, or a combination thereof;
c. a binder selected from polyvinylpyrrolidone, polyethylene glycols, co-polymers of vinyl acetate and vinylpyrrolidone, potato starch and corn starch, or a combination thereof;
d. a humectant selected from glycerol, propylene glycol, cetyl alcohol, glycerin monostearate and polyethylene glycols, or a combination thereof;
e. a surfactant selected from glyceryl monooleate, polyoxyethylene sorbitan fatty acid esters, sorbitan esters, polyvinyl alcohol, polysorbates, sodium lauryl sulfate, co-polymers of ethylene oxide and propylene oxide, propylene glycol monolaurate, glycerol caprylate/caprate, polyglycolized glycerides and polyethylene glycol hydroxystearate, or a combination thereof and
f. a natural or artificial beef or meat flavor;
wherein the composition comprises a IgY antibody at a concentration of about 1% to about 20% by weight.

6. The composition of claim 1, wherein the composition comprises a combination of at least one antimicrobial IgY antibody, active against oral health compromising (OHC) microorganisms, and at least one systemically-acting active agent selected from one or more arthropodicidal isoxazolines, one or more macrocyclic lactones, one or more spinosyn compounds, one or more spinosoid compounds, one or more benzimidazoles, levamisole, pyrantel, morantel, praziquantel, closantel, clorsulon, one or more amino acetonitrile active agents, one or more insect growth regulators, one or more neonicotinoids and one or more aryloazol-2-yl cyanoethylamino active agents, or a combination of thereof.

7. A method for the treatment and/or prevention of an oral health compromising (OHC) microorganism infection in an animal's oral cavity comprising administering to the animal an effective amount of the composition of claim 1.

8. The method of claim 7, wherein the OHC microorganism is S. mutans, S. salivarius, S. mutans, S. sanguinis, S. sobrinus, P. gulae, P. salivosa, P. gingivalis and P. denticanis.

9. The method of claim 7, which includes reducing the occurrence of dental caries or other oral health diseases or pathologies in an animal comprising the steps of:
a. selecting an animal with or at risk of developing oral health diseases or pathologies, including dental caries; and
b. contacting the oral cavity, and particularly the teeth, of the animal with a therapeutically effective amount of the antimicrobial IgY antibody-containing composition of claim 1; and
wherein the antibody is present in a safe and effective amount to reduce or eliminate adherence of one or more oral health compromising (OHC) microorganism(s) that cause oral or dental diseases or pathologies, thereby reducing the occurrence of dental caries or other oral health diseases or pathologies; and
wherein the IgY antibody is specific for at least one of the following OHC microorganisms: S. mutans, S. salivarius, S. mutans, S. sanguinis and S. sobrinus, P. gulae, P. salivosa, P. gingivalis and P. denticanis; and
wherein the therapeutically effective amount of the antimicrobial IgY antibody reduces the number or adherence of the OHC S. mutans, S. salivarius, S. mutans, S. sanguinis and S. sobrinus, P. gulae, P. salivosa, P. gingivalis and P. denticanis.

10. The method of claim 7, wherein the IgY antibody is an oral treatment form selected from a toothpaste, mouth rinse, gel, foam, varnish, polish, floss, dental tray, dental strip, copolymer membrane, and slow release bead;
wherein the IgY antibody is present in the oral supplement in a dosage of less than 1 mg/ml; or
wherein the IgY antibody is present in the oral supplement in a dosage of less than 100 μg/ml; or
wherein the IgY antibody is present in the oral supplement in a dosage of 50 μg/ml; or
wherein the IgY antibody is present in the oral supplement in a dosage of 25 μg/ml.

11. A composition, comprising:
a. a transfer agent;
b. a barrier material;
c. an antimicrobial IgY antibody, which is active in reducing or eliminating the numbers of one or more oral health compromising (OHC) microorganism from the oral cavity, including the teeth, of an animal;
wherein said transfer agent is present in an amount of 0.25 to 25 wt. %, based on the total weight of said transfer agent and said barrier material; and said barrier material is present in an amount of 75 to 99.75 wt. %, based on the total weight of said transfer agent and said barrier material; and
wherein said transfer agent is selected from lecithin, cetyl amine, N-tallow-1,3-propanediamine, hexetidine, and cetylpyridinium halide.

12. A method for producing antimicrobial IgY antibodies, which are effective in reducing or eliminating oral health compromising (OHC) microorganism, comprising the step of administering to a hen at least one OHC microorganism-associated polypeptide having a sequence having at least 60, 70, 80 or 90% identity to an immunologically sufficient portion of a sequence as set forth in any one of the following sequences: SEQ ID NO: 110-113, 120, 123-125, 130-133, 135-138, 143-148, 221-224, or 227-349.

13. A composition comprising one or more antimicrobial IgY of claim 11.

14. The composition of claim 13, wherein the composition is formulated as a gel.

15. The composition of claim 14, wherein the gel comprises CARBIGEN M at an optimal viscosity for mixture with the IgY and subsequent application to a canine's tooth.
